(19) United States
(12) Patent Application Publication
(10) Pub. No.: US 2011/0243976 A1
(43) Pub. Date: Oct. 6, 2011

(54) COMPOSITIONS COMPRISING PNEUMOCOCCAL ANTIGENS

(76) Inventors: Claudia Donati, Poggibonsi (IT); Alessadro Muzzi, Casole d'Elsa (IT); Vega Masignani, Siena (IT); Fabio Bagnoli, Monteriggioni (IT); Paolo Ruggiero, Rapolano Terme (IT); Michèle Anne Barocchi, Firenze (IT)

(21) Appl. No.: 12/733,010

(22) PCT Filed: Aug. 1, 2008
(86) PCT No.: PCT/IB2008/002866

§ 371 Date: Jun. 21, 2011

Related U.S. Application Data
(60) Provisional application No. 60/966,866, filed on Aug. 29, 2007.

(30) Foreign Application Priority Data
Aug. 1, 2007 (GB) 0714963.6

(51) Int. Cl. A61K 39/09; A61K 39/116; A61K 39/295; A61K 39/385; C07K 14/315; C12N 15/31; C12N 1/21; A61P 37/04

(52) U.S. Cl. 424/190.1; 424/244.1; 424/203.1; 424/201.1; 424/196.11; 424/197.11; 530/350; 536/23.7; 435/252.3

(57) ABSTRACT

Disclosed herein are various combinations of pneumococcal polypeptides for use in immunisation. Also disclosed herein are pneumococcal polypeptides that may be useful as single antigens. These polypeptides may optionally be used in combination with pneumococcal saccharides. The antigens may be used in pneumococcal vaccines, but may also be used as components in vaccines for immunising against multiple pathogens.

### TECHNICAL FIELD

[0001] This invention relates to antigens derived from S. pneumoniae and their use in immunisation.

### BACKGROUND ART

[0002] Streptococcus pneumoniae, also known as pneumococcus, is a Gram-positive spherical bacterium. It is the most common cause of acute bacterial meningitis in adults and in children over 5 years of age.

[0003] Current pneumococcal vaccines are based on capsular saccharides. The only pediatric vaccine is PREVNAR™, which is a mixture of conjugated saccharides from 7 different serotypes. An adult vaccine based on a mixture of conjugated saccharides from 23 different serotypes is also available. Both of these vaccines are difficult to manufacture, though, and there are more than 90 pneumococcal serotypes in total. Thus there remains a need to identify further and improved antigens for use in pneumococcal vaccines.

### DISCLOSURE OF THE INVENTION

[0004] Similar to references 1 and 2, the present inventors believe that an effective S. pneumoniae vaccine may require several antigenic components, and so they have identified various combinations of pneumococcal polypeptides for use in immunisation. They have also identified some pneumococcal polypeptides that may be useful as single antigens. These polypeptides may optionally be used in combination with pneumococcal saccharides or other pneumococcal polypeptides. The antigens may be used in pneumococcal vaccines, but may also be used as components in vaccines for immunising against multiple pathogens.

[0005] The inventors have identified the following 7 pneumococcal polypeptides: spr0057; spr0286; spr0565; spr1098; spr1345; spr1416; spr1418. This set of antigens is referred to herein as ‘the first antigen group’. Thus the invention provides an immunogenic composition comprising a combination of S. pneumoniae antigens, said combination comprising two or more (i.e. 2, 3, 4, 5, 6 or all 7) antigens selected from the group consisting of: (1) a spr0057 antigen; (2) a spr0286 antigen; (3) a spr0565 antigen; (4) a spr1098 antigen; (5) a spr1345 antigen; (6) a spr1416 antigen; and/or (7) a spr1418 antigen.

[0006] The inventors have identified the following 4 pneumococcal polypeptides: spr0867; spr1431; spr1739; spr2021. This set of antigens is referred to herein as ‘the second antigen group’. Thus the invention provides an immunogenic composition comprising a combination of S. pneumoniae antigens, said combination comprising two or more (i.e. 2, 3 or all 4) antigens selected from the group consisting of (1) a spr0867 antigen; (2) a spr1431 antigen; (3) a spr1739 antigen; and/or (4) a spr2021 antigen.

[0007] The inventors have identified the following 3 pneumococcal polypeptides: spr0096; spr1433; spr1707. This set of antigens is referred to herein as ‘the third antigen group’. Thus the invention provides an immunogenic composition comprising a combination of S. pneumoniae antigens, said combination comprising two or three antigens selected from the group consisting of: (1) a spr0096 antigen; (2) a spr1433 antigen; and/or (3) a spr1707 antigen.

[0008] The combination of 11 pneumococcal polypeptides in the first and second antigen groups is referred to herein as ‘the fourth antigen group’. Thus the invention provides an immunogenic composition comprising a combination of S. pneumoniae antigens, said combination comprising two or more (i.e. 2, 3, 4, 5, 6, 7, 8, 9, 10 or all 11) antigens selected from the group consisting of: (1) a spr0057 antigen; (2) a spr0286 antigen; (3) a spr0565 antigen; (4) a spr1098 antigen; (5) a spr1345 antigen; (6) a spr1416 antigen; (7) a spr1418 antigen; (8) a spr0867 antigen; (9) a spr1431 antigen; (10) a spr1739 antigen; and/or (11) a spr2021 antigen.

[0009] The combination of 10 pneumococcal polypeptides in the first and third antigen groups is referred to herein as ‘the fifth antigen group’. Thus the invention provides an immunogenic composition comprising a combination of S. pneumoniae antigens, said combination comprising two or more (i.e. 2, 3, 4, 5, 6, 7, 8, 9, or all 10) antigens selected from the group consisting of: (1) a spr0057 antigen; (2) a spr0286 antigen; (3) a spr0565 antigen; (4) a spr1098 antigen; (5) a spr1345 antigen; (6) a spr1416 antigen; (7) a spr1418 antigen; (8) a spr0096 antigen; (9) a spr1433 antigen; and/or (10) a spr1707 antigen.

[0010] The combination of 7 pneumococcal polypeptides in the second and third antigen groups is referred to herein as ‘the sixth antigen group’. Thus the invention provides an immunogenic composition comprising a combination of S. pneumoniae antigens, said combination comprising two or more (i.e. 2, 3, 4, 5, 6, or all 7) antigens selected from the group consisting of: (1) a spr0867 antigen; (2) a spr1431 antigen; (3) a spr1739 antigen; (4) a spr2021 antigen; (5) a spr0096 antigen; (6) a spr1433 antigen; and/or (7) a spr1707 antigen.

[0011] The combination of 14 pneumococcal polypeptides in the first, second and third antigen groups is referred to herein as ‘the seventh antigen group’. Thus the invention provides an immunogenic composition comprising a combination of S. pneumoniae antigens, said combination comprising two or more (i.e. 2, 3, 4, 5, 6, 7, 8, 9, 10, 11, 12, 13, or all 14) antigens selected from the group consisting of: (1) a spr0057 antigen; (2) a spr0286 antigen; (3) a spr0565 antigen; (4) a spr1098 antigen; (5) a spr1345 antigen; (6) a spr1416 antigen; (7) a spr1418 antigen; (8) a spr0867 antigen; (9) a spr1431 antigen; (10) a spr1739 antigen; (11) a spr2021 antigen; (12) a spr0096 antigen; (13) a spr1433 antigen; and/or (14) a spr1707 antigen.

[0012] Within the seventh antigen group, a preferred subset of four antigens is the ‘eighth antigen group’, which includes an antigen from each of the first, second and third groups, namely spr0057, spr0096, spr0565 and spr2021. Thus the invention provides an immunogenic composition comprising a combination of S. pneumoniae antigens, said combination comprising two or more (i.e. 2, 3 or all 4) antigens selected from the group consisting of (1) a spr0057 antigen; (2) a spr0096 antigen; (3) a spr0565 antigen; and/or (4) a spr2021 antigen. Within this eighth group, the composition may comprise: (1), (2) and (3); (1), (2) and (4); (1), (3) and (4); (2), (3) and (4); or (1), (2), (3) and (4). Expression of these four antigens has been immunologically confirmed across a panel of 32 pneumococcal strains with various serotypes.

[0013] The ‘ninth antigen group’ is the eighth antigen group plus a RrgB pilus antigen. Thus the invention also provides an immunogenic composition comprising a combination of S. pneumoniae antigens, said combination comprising one or more RrgB pilus antigen(s) and two or more (i.e. 2, 3 or all 4) antigens selected from the group consisting of: (1) a spr0057 antigen; (2) a spr0096 antigen; (3) a spr0565 antigen; and/or (4) a spr2021 antigen.

[0014] The ‘tenth antigen group’ is the eighth antigen group plus a Pmp polypeptide. Thus the invention also provides an immunogenic composition comprising a combination of S. pneumoniae antigens, said combination comprising two or more (i.e. 2, 3, 4 or all 5) antigens selected from the group consisting of: (1) a spr0057 antigen; (2) a spr0096 antigen; (3) a spr0565 antigen; (4) a spr2021 antigen; and/or (5) a Pmp polypeptide.

[0015] Specific combinations of interest comprise: (i) a spr0057 antigen and a spr0096 antigen; (ii) a spr0057 antigen and a spr2021 antigen; (iii) a spr0057 antigen, a spr0096 antigen and a spr2021 antigen; (iv) a spr0057 antigen and a spr0565 antigen; (v) a spr0565 antigen and a spr2021 antigen; (vi) a spr0057 antigen, a spr0565 antigen and a spr2021 antigen; (vii) a spr0565 antigen, a spr2021 antigen and a spr1739 antigen e.g. detoxified; and (viii) a spr0565 antigen, a spr2021 antigen and a Pmp polypeptide.

[0016] The invention also provides an immunogenic composition comprising two or more different pneumococcal exoglycosidases.

[0017] The invention also provides an immunogenic composition comprising at least one pneumococcal exoglycosidase and at least one pneumococcal peptidoglycan hydrolase.

[0018] The invention also provides an immunogenic composition comprising two or more different peptidoglycan hydrolases.

[0019] Advantageous combinations of the invention are those in which two or more antigens act synergistically. Thus the protection against pneumococcal disease achieved by their combined administration exceeds that expected by mere addition of their individual protective efficacy.

[0020] Further Polypeptide Antigens

[0021] In additions to antigens from the various antigen groups of the invention, immunogenic compositions may include one or more of the following polypeptides to enhance the anti-pneumococcal immune response elicited by the composition:
[0022] One or more subunits of a pneumococcal pilus, such as RrgA, RrgB and/or RrgC.
[0023] A ClpP polypeptide.
[0024] A LytA polypeptide.
[0025] A CPL1 polypeptide.
[0026] A PhtA polypeptide.
[0027] A PhtB polypeptide.
[0028] A PhtD polypeptide.
[0029] A PhtE polypeptide.
[0030] A CbpD polypeptide
[0031] A CbpG polypeptide
[0032] A PvaA polypeptide.
[0033] A Hic polypeptide.
[0034] A Pmp polypeptide.
[0035] A ZmpB polypeptide.
[0036] A PspA polypeptide
[0037] A PsaA polypeptide
[0038] A PspC polypeptide.
[0039] A PrtA polypeptide.
[0040] A Sp91 polypeptide.
[0041] A Sp133 polypeptide.
[0042] A PiuA polypeptide and/or a PiaA polypeptide.
[0043] A spr0222 polypeptide.
[0044] An antigen selected from the group consisting of: IC1; IC2; IC3; IC4; IC5; IC6; IC7; IC8; IC9; IC10; IC11; IC12; IC13; IC14; IC15; IC16; IC17; IC18; IC19; IC20; IC21; IC22; IC23; IC24; IC25; IC26; IC27; IC28; IC29; IC30; IC31; IC32; IC33; IC34; IC35; IC36; IC37; IC38; IC39; IC40; IC41; IC42; IC43; IC44; IC45; IC46; IC47; IC48; IC49; IC50; IC51; IC52; IC53; IC54; IC55; IC56; IC57; IC58; IC59; IC60; IC61; IC62; IC63; IC64; IC65; IC66; IC67; IC68; IC69; IC70; IC71; IC72; IC73; IC74; IC75; IC76; IC77; IC78; IC79; IC80; IC81; IC82; IC83; IC84; IC85; IC86; IC88; IC89; IC90; IC91; IC92; IC93; IC94; IC95; IC96; IC97; IC98; IC99; IC100; IC101; IC102; IC103; IC104; IC105; IC106; IC107; IC108; IC109; IC110; IC111; IC112; IC113; IC114; IC115; IC116; IC117; IC118; IC119; IC120; IC121; IC122; IC123; IC124; IC125; IC126; IC127; IC128; IC129; IC130; and IC131.
[0045] An antigen selected from the group consisting of: ID-204, ID-212, ID-213, ID-214, ID-215, ID-216, ID-217, ID-219, ID-220, ID-225, ID-301, ID-302, ID-303, ID-304, ID-305, ID-306, as disclosed in reference 3.
[0046] An antigen selected from the group consisting of: Sit1A, Sit1B, Sit1C, Sit2B, Sit2C, Sit2D, Sit3A, Sit3B, Sit3C, Sit3D, ORF1, ORF2, ORF3, ORF4, ORF5, ORF6, ORF6, ORF7, ORF8, ORF9, ORF10, ORF11, ORF12, ORF13, ORF14, MS1, MS2, MS3, MS4, MS5, MS6, MS7, MS8, MS9, MS10 or MS11, as disclosed in reference 4.
[0047] An antigen disclosed in reference 5.
[0048] An antigen disclosed in Tables 1-3 of reference 6, such as CbiO.
[0049] An antigen disclosed in reference 7, such as the 30S ribosomal protein S8.
[0050] An antigen selected from the group consisting of: a phosphoenolpyruvate protein phosphotransferase; a phosphomannomutase; a trigger factor; an elongation factor G; a tetracycline resistance protein (tetO); a DNA-directed RNA polymerase alpha-chain; a NADH oxidase; a glutamyl-tRNA amidotransferase subunit A; a N utilization substance protein A homolog; a Xaa-His dipeptidase; a cell division protein ftsz; a zinc metalloproteinase; a L-lactate dehydrogenase; a glyceraldehyde 3-phosphate dehydrogenase (GAPDH); a fructose-biphosphate aldolase; a UDP-glucose 4-epimerase; a GTP binding protein typA/BipA a GMP synthase; a glutamyl-tRNA synthetase; a NADP-specific glutamate dehydrogenase; an elongation factor TS; a phosphoglycerate kinase; a pyridine nucleotide-disulfide oxido-reductase; a 40S ribosomal protein S1; a 6-phosphogluconate dehydrogenase; an aminopeptidase C; a cathomyl-phosphate synthase (large subunit); a PTS system mannose-specific IIAB component; a ribosomal protein S2; a dihydroorotate dehydrogenase; an aspartate carbamoyltransferase; an elongation factor Tu; a pneumococcal surface immunogenic protein A (PsipA); a phosphogycerate kinase; an ABC transporter substrate-binding protein endopeptidase O; a pneumococcal surface immunogenic protein B (PsipB); or a pneumococcal surface immunogenic protein C (PsipC) [8].

[0051] Pili

[0052] Many strains of S. pneumoniae possess a pilus, encoded within a pathogenicity islet (rlrA). The islet encodes three surface proteins (RrgA, RrgB, and RrgC) and three sortase enzymes. In some embodiments of the invention, a composition will include, in addition to an antigen from one of the groups of the invention, one or more of: RrgA; RrgB; RrgC; SrtB; SrtC; and/or SrtD. Of these six proteins, including one or more of RrgA, RrgB and/or RrgC is preferred. RrgB is the most preferred pilus protein to be included.

[0053] Some strains possess a different pilus type [9], ‘PI-2’. The PI-2 operon encodes PitA, SipA, PitB, SrtG1, and SrtG2. In some embodiments of the invention, a composition will include, in addition to an antigen from one of the groups of the invention, one or more of: PitA, SipA, PitB, SrtG1, and/or SrtG2.

[0054] IC1 to IC131

[0055] As mentioned above, in some embodiments of the invention a composition will include, in addition to an antigen from one of the groups of the invention, one or more antigens selected from the group consisting of IC1 to IC131. These 131 polypeptides are disclosed in reference 10, being the 144 polypeptides of Table 3 therein except for those listed as SP0117, SP0641, SP0664, SP1003, SP1004, SP1174, SP1175, SP1573, SP1687, SP1693, SP1937 and SP2190. Within the 132 polypeptides IC1 to IC131, a preferred subset from which the one or more polypeptide(s) may be selected is: IC1; IC8; IC16; IC23; IC31; IC34; IC40; IC45; IC47; IC57; IC58; IC60; and IC69.

[0056] Combinations with Pneumococcal Conjugates

[0057] The individual antigens identified in the antigen groups of the invention may be used in combination with pneumococcal conjugates. Thus the invention provides an immunogenic composition comprising a combination of:
[0058] (1) one or more antigen(s) selected from the first, second, third, fourth, fifth, sixth, seventh, eighth, ninth and tenth antigen groups (as defined above); and
[0059] (2) one or more conjugates of a pneumococcal capsular saccharide and a carrier protein.

[0060] A conjugate used in component (2) of this combination includes a saccharide moiety and a carrier moiety. The saccharide moiety is from the capsular saccharide of a pneumococcus. The saccharide may be a polysaccharide having the size that arises during purification of the saccharide from bacteria, or it may be an oligosaccharide achieved by fragmentation of such a polysaccharide. In the 7-valent PREVNAR™ product, for instance, 6 of the saccharides are presented as intact polysaccharides while one (the 18C serotype) is presented as an oligosaccharide.

[0061] A composition may include a capsular saccharide from one or more of the following pneumococcal serotypes: 1, 2, 3, 4, 5, 6A, 6B, 7F, 8, 9N, 9V, 10A, 11A, 12F, 14, 15B, 17F, 18C, 19A, 19F, 20, 22F, 23F and/or 33F. A composition may include multiple serotypes e.g. 2, 3, 4, 5, 6, 7, 8, 9, 10, 11, 12, 13, 14, 15, 16, 17, 18, 19, 20, 21, 22, 23 or more serotypes. 7-valent, 9-valent, 10-valent, 11-valent and 13-valent conjugate combinations are already known in the art, as is a 23-valent unconjugated combination.

[0062] For example, an 10-valent combination may include saccharide from serotypes 1, 4, 5, 6B, 7F, 9V, 14, 18C, 19F and 23F. An 11-valent combination may further include saccharide from serotype 3. A 12-valent combination may add to the 10-valent mixture: serotypes 6A and 19A; 6A and 22F; 19A and 22F; 6A and 15B; 19A and 15B; r 22F and 15B; A 13-valent combination may add to the 11-valent mixture: serotypes 19A and 22F; 8 and 12F; 8 and 15B; 8 and 19A; 8 and 22F; 12F and 15B; 12F and 19A; 12F and 22F; 15B and 19A; 15B and 22F. etc.

[0063] The carrier moiety will usually be a protein, but preferably not one of the antigens of (1). Typical carrier proteins are bacterial toxins, such as diphtheria or tetanus toxins, or toxoids or mutants thereof. The CRM₁₉₇ diphtheria toxin mutant [11] is useful, and is the carrier in the PREVNAR™ product. Other suitable carrier proteins include the N. meningitidis outer membrane protein complex [12], synthetic peptides [13,14], heat shock proteins [15,16], pertussis proteins [17,18], cytokines [19], lymphokines [19], hormones [19], growth factors [19], artificial proteins comprising multiple human CD4⁺ T cell epitopes from various pathogen-derived antigens [20] such as N 19 [21], protein D from H. influenzae [22-24], pneumolysin [25] or its non-toxic derivatives [26], pneumococcal surface protein PspA [27], iron-uptake proteins [28], toxin A or B from C. difficile [29], recombinant P. aeruginosa exoprotein A (rEPA) [30], etc.

[0064] Where a composition includes more than one conjugate, each conjugate may use the same carrier protein or a different carrier protein. Reference 31 describes potential advantages when using different carrier proteins in multivalent pneumococcal conjugate vaccines

[0065] In some embodiments, a single conjugate may carry saccharides from multiple serotypes [32]. Usually, however, each conjugate will include saccharide from a single serotype.

[0066] Conjugates may have excess carrier (w/w) or excess saccharide (w/w). In some embodiments, a conjugate may include equal weights of each.

[0067] The carrier molecule may be covalently conjugated to the carrier directly or via a linker. Direct linkages to the protein may be achieved by, for instance, reductive amination between the saccharide and the carrier, as described in, for example, references 33 and 34. The saccharide may first need to be activated e.g. by oxidation. Linkages via a linker group may be made using any known procedure, for example, the procedures described in references 35 and 36. A preferred type of linkage is an adipic acid linker, which may be formed by coupling a free —NH₂ group (e.g. introduced to a glucan by amination) with adipic acid (using, for example, diimide activation), and then coupling a protein to the resulting saccharide-adipic acid intermediate [37,38]. Another preferred type of linkage is a carbonyl linker, which may be formed by reaction of a free hydroxyl group of a saccharide CDI [39, 40] followed by reaction with a protein to form a carbamate linkage. Other linkers include β-propionamido [41], nitrophenyl-ethylamine [42], haloacyl halides [43], glycosidic linkages [44], 6-aminocaproic acid [45], ADH [46], C₄ to C₁₂ moieties [47], etc. Carbodiimide condensation can also be used [48].

[0068] The individual antigens identified in the antigen groups of the invention may be used as carrier proteins for pneumococcal capsular saccharides, to form a covalent conjugate. Thus the invention provides an immunogenic composition comprising a conjugate of (1) an antigen selected from the first, second, third, fourth, fifth, sixth, seventh, eighth, ninth or tenth antigen groups and (2) a pneumococcal capsular saccharide. Further characteristics of such a conjugate are described above. The use of pneumococcal proteins as carriers in conjugates is known in the art [e.g. refs. 25, 27 & 67]. These conjugates may be combined with any of the further antigens disclosed herein.

[0069] Combinations with Non-Pneumococcal Antigens

[0070] The individual antigens identified in the antigen groups of the invention may be used in combination with non-pneumococcal antigens. Thus the invention provides an immunogenic composition comprising a combination of:
[0071] (1) one or more antigen(s) selected from the first, second, third, fourth, fifth, sixth, seventh, eighth, ninth or tenth antigen groups (as defined above); and
[0072] (2) one or more antigen(s) selected from the group consisting of diphtheria toxoid; tetanus toxoid; hepatitis B virus surface antigen; an inactivated poliovirus antigen; one or more acellular pertussis antigens; a conjugate of the capsular saccharide antigen from Haemophilus influenzae type B; a conjugate of the capsular saccharide antigen from serogroup C of Neisseria meningitidis; a conjugate of the capsular saccharide antigen from serogroup Y of Neisseria meningitidis; a conjugate of the capsular saccharide antigen from serogroup W135 of Neisseria meningitidis; and a conjugate of the capsular saccharide antigen from serogroup A of Neisseria meningitidis.

[0073] Diphtheria toxoid can be obtained by treating (e.g. using formaldehyde) diphtheria toxin from Corynebacterium diphtheriae. Diphtheria toxoids are disclosed in more detail in chapter 13 of reference 49.

[0074] Tetanus toxoid can be obtained by treating (e.g. using formaldehyde) tetanus toxin from Clostridium tetani. Tetanus toxoids are disclosed in more detail in chapter 27 of reference 49.

[0075] Hepatitis B virus surface antigen (HBsAg) is the major component of the capsid of hepatitis B virus. It is conveniently produced by recombinant expression in a yeast, such as a Saccharomyces cerevisiae.

[0076] Inactivated poliovirus antigens are prepared from viruses grown on cell culture and then inactivated (e.g. using formaldehyde). Because poliomyelitis can be caused by one of three types of poliovirus, as explained in chapter 24 of reference 49, a composition may include three poliovirus antigens: poliovirus Type 1 (e.g. Mahoney strain), poliovirus Type 2 (e.g. MEF-1 strain), and poliovirus Type 3 (e.g. Saukett strain).

[0077] Acellular pertussis antigen(s) comprise specific purified B. pertussis antigens, either purified from the native bacterium or purified after expression in a recombinant host. It is usual to use more than one acellular antigen, and so a composition may include one, two or three of the following well-known and well-characterized B. pertussis antigens: (1) detoxified pertussis toxin (pertussis toxoid, or ‘PT’); (2) filamentous hemagglutinin (‘FHA’); (3) pertactin (also known as the ‘69 kiloDalton outer membrane protein’). FHA and pertactin may be treated with formaldehyde prior to use according to the invention. PT may be detoxified by treatment with formaldehyde and/or glutaraldehyde but, as an alternative to this chemical detoxification procedure, it may be a mutant PT in which enzymatic activity has been reduced by mutagenesis [50]. Further acellular pertussis antigens that can be used include fimbriae (e.g. agglutinogens 2 and 3).

[0078] When a composition includes one of diphtheria toxoid, tetanus toxoid or an acellular pertussis antigen in component (2) then it will usually include all three of them i.e. component (2) will include a D-T-Pa combination.

[0079] First Antigen Group

[0080] (1) spr0057

[0081] The original ‘spr0057’ sequence was annotated in reference 84 as ‘Beta-N-acetyl-hexosaminidase precursor’ (see GI:15902101). For reference purposes, the amino acid sequence of full length spr0057 as found in the R6 strain is given as SEQ ID NO: 1 herein.

[0082] Preferred spr0057 polypeptides for use with the invention comprise an amino acid sequence: (a) having 50% or more identity (e.g. 60%, 65%, 70%, 75%, 80%, 85%, 90%, 91%, 92%, 93%, 94%, 95%, 96%, 97%, 98%, 99%, 99.5% or more) to SEQ ID NO: 1; and/or (b) comprising a fragment of at least ‘n’ consecutive amino acids of SEQ ID NO: 1, wherein ‘n’ is 7 or more (e.g. 8, 10, 12, 14, 16, 18, 20, 25, 30, 35, 40, 50, 60, 70, 80, 90, 100, 150, 200, 250 or more). These spr0057 proteins include variants of SEQ ID NO: 1. Preferred fragments of (b) comprise an epitope from SEQ ID NO: 1. Other preferred fragments lack one or more amino acids (e.g. 1, 2, 3, 4, 5, 6, 7, 8, 9, 10, 15, 20, 25 or more) from the C-terminus and/or one or more amino acids (e.g. 1, 2, 3, 4, 5, 6, 7, 8, 9, 10, 15, 20, 25 or more) from the N-terminus of SEQ ID NO: 1 while retaining at least one epitope of SEQ ID NO: 1. Other fragments omit one or more protein domains. One suitable fragment is SEQ ID NO: 180, which omits the natural leader peptide and sortase recognition sequences.

[0083] Combinations of spr0057 with other pneumococcal antigens have shown good synergistic effects.

[0084] (2) spr0286

[0085] The original ‘spr0286’ sequence was annotated in reference 84 as ‘Hyaluronate lyase precursor’ (see GI:15902330). For reference purposes, the amino acid sequence of full length spr0286 as found in the R6 strain is given as SEQ ID NO: 2 herein.

[0086] Preferred spr0286 polypeptides for use with the invention comprise an amino acid sequence: (a) having 50% or more identity (e.g. 60%, 65%, 70%, 75%, 80%, 85%, 90%, 91%, 92%, 93%, 94%, 95%, 96%, 97%, 98%, 99%, 99.5% or more) to SEQ ID NO: 2; and/or (b) comprising a fragment of at least ‘n’ consecutive amino acids of SEQ ID NO: 2, wherein ‘n’ is 7 or more (e.g. 8, 10, 12, 14, 16, 18, 20, 25, 30, 35, 40, 50, 60, 70, 80, 90, 100, 150, 200, 250 or more). These spr0286 proteins include variants of SEQ ID NO: 2. Preferred fragments of (b) comprise an epitope from SEQ ID NO: 2. Other preferred fragments lack one or more amino acids (e.g. 1, 2, 3, 4, 5, 6, 7, 8, 9, 10, 15, 20, 25 or more) from the C-terminus and/or one or more amino acids (e.g. 1, 2, 3, 4, 5, 6, 7, 8, 9, 10, 15, 20, 25 or more) from the N-terminus of SEQ ID NO: 2 while retaining at least one epitope of SEQ ID NO: 2. Other fragments omit one or more protein domains. One suitable fragment is SEQ ID NO: 181, which omits the natural leader peptide and sortase recognition sequences. Other suitable fragments are SEQ ID NOs: 182 and 183.

[0087] (3) spr0565

[0088] The original ‘spr0565’ sequence was annotated in reference 84 as ‘beta-galactosidase precursor’ (see GI:15902609). For reference purposes, the amino acid sequence of full length spr0565 as found in the R6 strain is given as SEQ ID NO: 3 herein.

[0089] Preferred spr0565 polypeptides for use with the invention comprise an amino acid sequence: (a) having 50% or more identity (e.g. 60%, 65%, 70%, 75%, 80%, 85%, 90%, 91%, 92%, 93%, 94%, 95%, 96%, 97%, 98%, 99%, 99.5% or more) to SEQ ID NO: 3; and/or (b) comprising a fragment of at least ‘n’ consecutive amino acids of SEQ ID NO: 3, wherein ‘n’ is 7 or more (e.g. 8, 10, 12, 14, 16, 18, 20, 25, 30, 35, 40, 50, 60, 70, 80, 90, 100, 150, 200, 250 or more). These spr0565 proteins include variants of SEQ ID NO: 3 (e.g. SEQ ID NO: 66; see below). Preferred fragments of (b) comprise an epitope from SEQ ID NO: 3. Other preferred fragments lack one or more amino acids (e.g. 1, 2, 3, 4, 5, 6, 7, 8, 9, 10, 15, 20, 25 or more) from the C-terminus and/or one or more amino acids (e.g. 1, 2, 3, 4, 5, 6, 7, 8, 9, 10, 15, 20, 25 or more) from the N-terminus of SEQ ID NO: 3 while retaining at least one epitope of SEQ ID NO: 3. Other fragments omit one or more protein domains. One suitable fragment is SEQ ID NO: 184, which omits the natural leader peptide and sortase recognition sequences. Other suitable fragments are SEQ ID NOs: 177 and 178.

[0090] A variant form of spr0565 is SEQ ID NO: 66 herein. The use of this variant form for immunisation is reported in reference 10 (SEQ ID NO: 178 therein). Useful spr0565 polypeptides may comprise an amino acid sequence: (a) having 50% or more identity (e.g. 60%, 65%, 70%, 75%, 80%, 85%, 90%, 91%, 92%, 93%, 94%, 95%, 96%, 97%, 98%, 99%, 99.5% or more) to SEQ ID NO: 66; and/or (b) comprising a fragment of at least ‘n’ consecutive amino acids of SEQ ID NO: 66, wherein ‘n’ is 7 or more (e.g. 8, 10, 12, 14, 16, 18, 20, 25, 30, 35, 40, 50, 60, 70, 80, 90, 100, 150, 200, 250 or more). These polypeptides include variants of SEQ ID NO: 66. Preferred fragments of (b) comprise an epitope from SEQ ID NO: 66. Other preferred fragments lack one or more amino acids (e.g. 1, 2, 3, 4, 5, 6, 7, 8, 9, 10, 15, 20, 25 or more) from the C-terminus and/or one or more amino acids (e.g. 1, 2, 3, 4, 5, 6, 7, 8, 9, 10, 15, 20, 25 or more) from the N-terminus of SEQ ID NO: 66 while retaining at least one epitope of SEQ ID NO: 66. Other fragments omit one or more protein domains.

[0091] Immunogenic fragments of SEQ ID NO: 66 are identified in table 1 of reference 10.

[0092] Because spr0565 is naturally a long polypeptide (>2000 aa) it can be more convenient to express fragments. Thus a suitable form of spr0565 for use with the invention may be less than 1500 amino acids long (e.g. <1400, <1300, <1200, <1100, etc.). Such short forms of spr0565 include ‘spr0565A’ (SEQ ID NO: 177) and ‘spr0565B’ (SEQ ID NO: 178).

[0093] Combinations of spr0565 with other pneumococcal antigens have shown good synergistic effects.

[0094] (4) spr1098

[0095] The original ‘spr1098’ sequence was annotated in reference 84 as ‘Sortase’ (see GI:15903141). For reference purposes, the amino acid sequence of full length spr1098 as found in the R6 strain is given as SEQ ID NO: 4 herein.

[0096] Preferred spr1098 polypeptides for use with the invention comprise an amino acid sequence: (a) having 50% or more identity (e.g. 60%, 65%, 70%, 75%, 80%, 85%, 90%, 91%, 92%, 93%, 94%, 95%, 96%, 97%, 98%, 99%, 99.5% or more) to SEQ ID NO: 4; and/or (b) comprising a fragment of at least ‘n’ consecutive amino acids of SEQ ID NO: 4, wherein ‘n’ is 7 or more (e.g. 8, 10, 12, 14, 16, 18, 20, 25, 30, 35, 40, 50, 60, 70, 80, 90, 100, 150, 200, 250 or more). These spr1098 proteins include variants of SEQ ID NO: 4. Preferred fragments of (b) comprise an epitope from SEQ ID NO: 4. Other preferred fragments lack one or more amino acids (e.g. 1, 2, 3, 4, 5, 6, 7, 8, 9, 10, 15, 20, 25 or more) from the C-terminus and/or one or more amino acids (e.g. 1, 2, 3, 4, 5, 6, 7, 8, 9, 10, 15, 20, 25 or more) from the N-terminus of SEQ ID NO: 4 while retaining at least one epitope of SEQ ID NO: 4. Other fragments omit one or more protein domains. One suitable fragment is SEQ ID NO: 187, which omits the natural leader peptide sequence.

[0097] (5) spr1345

[0098] The original ‘spr1345’ sequence was annotated in reference 84 as ‘hypothetical protein’ (see GI:15903388). For reference purposes, the amino acid sequence of full length spr1345 as found in the R6 strain is given as SEQ ID NO: 5 herein.

[0099] Preferred spr1345 polypeptides for use with the invention comprise an amino acid sequence: (a) having 50% or more identity (e.g. 60%, 65%, 70%, 75%, 80%, 85%, 90%, 91%, 92%, 93%, 94%, 95%, 96%, 97%, 98%, 99%, 99.5% or more) to SEQ ID NO: 5; and/or (b) comprising a fragment of at least ‘n’ consecutive amino acids of SEQ ID NO: 5, wherein ‘n’ is 7 or more (e.g. 8, 10, 12, 14, 16, 18, 20, 25, 30, 35, 40, 50, 60, 70, 80, 90, 100, 150, 200, 250 or more). These spr1345 proteins include variants of SEQ ID NO: 5. Preferred fragments of (b) comprise an epitope from SEQ ID NO: 5. Other preferred fragments lack one or more amino acids (e.g. 1, 2, 3, 4, 5, 6, 7, 8, 9, 10, 15, 20, 25 or more) from the C-terminus and/or one or more amino acids (e.g. 1, 2, 3, 4, 5, 6, 7, 8, 9, 10, 15, 20, 25 or more) from the N-terminus of SEQ ID NO: 5 while retaining at least one epitope of SEQ ID NO: 5. Other fragments omit one or more protein domains. One suitable fragment is SEQ ID NO: 188, which omits the natural leader peptide and sortase recognition sequences.

[0100] (6) spr1416

[0101] The original ‘spr1416’ sequence was annotated in reference 84 as ‘hypothetical protein’ (see GI:15903459). For reference purposes, the amino acid sequence of full length spr1416 as found in the R6 strain is given as SEQ ID NO: 6 herein.

[0102] Preferred spr1416 polypeptides for use with the invention comprise an amino acid sequence: (a) having 50% or more identity (e.g. 60%, 65%, 70%, 75%, 80%, 85%, 90%, 91%, 92%, 93%, 94%, 95%, 96%, 97%, 98%, 99%, 99.5% or more) to SEQ ID NO: 6; and/or (b) comprising a fragment of at least ‘n’ consecutive amino acids of SEQ ID NO: 6, wherein ‘n’ is 7 or more (e.g. 8, 10, 12, 14, 16, 18, 20, 25, 30, 35, 40, 50, 60, 70, 80, 90, 100, 150, 200, 250 or more). These spr1416 proteins include variants of SEQ ID NO: 6. Preferred fragments of (b) comprise an epitope from SEQ ID NO: 6. Other preferred fragments lack one or more amino acids (e.g. 1, 2, 3, 4, 5, 6, 7, 8, 9, 10, 15, 20, 25 or more) from the C-terminus and/or one or more amino acids (e.g. 1, 2, 3, 4, 5, 6, 7, 8, 9, 10, 15, 20, 25 or more) from the N-terminus of SEQ ID NO: 6 while retaining at least one epitope of SEQ ID NO: 6. Other fragments omit one or more protein domains.

[0103] (7) spr1418

[0104] The original ‘spr1418’ sequence was annotated in reference 84 as ‘hypothetical protein’ (see GI:15903461). For reference purposes, the amino acid sequence of full length spr1418 as found in the R6 strain is given as SEQ ID NO: 7 herein.

[0105] Preferred spr1418 polypeptides for use with the invention comprise an amino acid sequence: (a) having 50% or more identity (e.g. 60%, 65%, 70%, 75%, 80%, 85%, 90%, 91%, 92%, 93%, 94%, 95%, 96%, 97%, 98%, 99%, 99.5% or more) to SEQ ID NO: 7; and/or (b) comprising a fragment of at least ‘n’ consecutive amino acids of SEQ ID NO: 7, wherein ‘n’ is 7 or more (e.g. 8, 10, 12, 14, 16, 18, 20, 25, 30, 35, 40, 50, 60, 70, 80, 90, 100, 150, 200, 250 or more). These spr1418 proteins include variants of SEQ ID NO: 7. Preferred fragments of (b) comprise an epitope from SEQ ID NO: 7. Other preferred fragments lack one or more amino acids (e.g. 1, 2, 3, 4, 5, 6, 7, 8, 9, 10, 15, 20, 25 or more) from the C-terminus and/or one or more amino acids (e.g. 1, 2, 3, 4, 5, 6, 7, 8, 9, 10, 15, 20, 25 or more) from the N-terminus of SEQ ID NO: 7 while retaining at least one epitope of SEQ ID NO: 7. Other fragments omit one or more protein domains.

[0106] Second Antigen Group

[0107] (1) spr0867

[0108] The original ‘spr0867’ sequence was annotated in reference 84 as ‘Endo-beta-N-acetylglucosaminidase’ (see GI:15902911). For reference purposes, the amino acid sequence of full length spr0867 as found in the R6 strain is given as SEQ ID NO: 8 herein.

[0109] Preferred spr0867 polypeptides for use with the invention comprise an amino acid sequence: (a) having 50% or more identity (e.g. 60%, 65%, 70%, 75%, 80%, 85%, 90%, 91%, 92%, 93%, 94%, 95%, 96%, 97%, 98%, 99%, 99.5% or more) to SEQ ID NO: 8; and/or (b) comprising a fragment of at least ‘n’ consecutive amino acids of SEQ ID NO: 8, wherein ‘n’ is 7 or more (e.g. 8, 10, 12, 14, 16, 18, 20, 25, 30, 35, 40, 50, 60, 70, 80, 90, 100, 150, 200, 250 or more). These spr0867 proteins include variants of SEQ ID NO: 8. Preferred fragments of (b) comprise an epitope from SEQ ID NO: 8. Other preferred fragments lack one or more amino acids (e.g. 1, 2, 3, 4, 5, 6, 7, 8, 9, 10, 15, 20, 25 or more) from the C-terminus and/or one or more amino acids (e.g. 1, 2, 3, 4, 5, 6, 7, 8, 9, 10, 15, 20, 25 or more) from the N-terminus of SEQ ID NO: 8 while retaining at least one epitope of SEQ ID NO: 8. Other fragments omit one or more protein domains. One suitable fragment is SEQ ID NO: 185, which omits the natural leader peptide sequence.

[0110] (2) spr1431

[0111] The original ‘spr1431’ sequence was annotated in reference 84 as ‘1,4-beta-N-acetylmuramidase’ (see GI:15903474). It is also known as ‘LytC’, and its use for immunisation is reported in reference 67. For reference purposes, the amino acid sequence of full length spr1431 as found in the R6 strain is given as SEQ ID NO: 9 herein.

[0112] Preferred spr1431 polypeptides for use with the invention comprise an amino acid sequence: (a) having 50% or more identity (e.g. 60%, 65%, 70%, 75%, 80%, 85%, 90%, 91%, 92%, 93%, 94%, 95%, 96%, 97%, 98%, 99%, 99.5% or more) to SEQ ID NO: 9; and/or (b) comprising a fragment of at least ‘n’ consecutive amino acids of SEQ ID NO: 9, wherein ‘n’ is 7 or more (e.g. 8, 10, 12, 14, 16, 18, 20, 25, 30, 35, 40, 50, 60, 70, 80, 90, 100, 150, 200, 250 or more). These spr1431 proteins include variants of SEQ ID NO: 9. Preferred fragments of (b) comprise an epitope from SEQ ID NO: 9. Other preferred fragments lack one or more amino acids (e.g. 1, 2, 3, 4, 5, 6, 7, 8, 9, 10, 15, 20, 25 or more) from the C-terminus and/or one or more amino acids (e.g. 1, 2, 3, 4, 5, 6, 7, 8, 9, 10, 15, 20, 25 or more) from the N-terminus of SEQ ID NO: 9 while retaining at least one epitope of SEQ ID NO: 9. Other fragments omit one or more protein domains. One suitable fragment is SEQ ID NO: 189, which omits the natural leader peptide sequence.

[0113] (3) spr1739

[0114] The ‘spr1739’ polypeptide is pneumolysin (e.g. see GI:15903781). For reference purposes, the amino acid sequence of full length spr1739 as found in the R6 strain is given as SEQ ID NO: 10 herein.

[0115] Preferred spr1739 polypeptides for use with the invention comprise an amino acid sequence: (a) having 50% or more identity (e.g. 60%, 65%, 70%, 75%, 80%, 85%, 90%, 91%, 92%, 93%, 94%, 95%, 96%, 97%, 98%, 99%, 99.5% or more) to SEQ ID NO: 10; and/or (b) comprising a fragment of at least ‘n’ consecutive amino acids of SEQ ID NO: 10, wherein ‘n’ is 7 or more (e.g. 8, 10, 12, 14, 16, 18, 20, 25, 30, 35, 40, 50, 60, 70, 80, 90, 100, 150, 200, 250 or more). These spr1739 proteins include variants of SEQ ID NO: 10. Preferred fragments of (b) comprise an epitope from SEQ ID NO: 10. Other preferred fragments lack one or more amino acids (e.g. 1, 2, 3, 4, 5, 6, 7, 8, 9, 10, 15, 20, 25 or more) from the C-terminus and/or one or more amino acids (e.g. 1, 2, 3, 4, 5, 6, 7, 8, 9, 10, 15, 20, 25 or more) from the N-terminus of SEQ ID NO: 10 while retaining at least one epitope of SEQ ID NO: 10. Other fragments omit one or more protein domains.

[0116] Mutant forms of pneumolysin for vaccination use are known in the art [26, 51-56], and these mutant forms may be used with the invention. Detoxification can be achieved by C-terminal truncation (e.g. see ref. 57) e.g. deleting 34 amino acids, 45 amino acids, 7 amino acids [58], etc. Further mutations, numbered according to SEQ ID NO: 20, include Pro325→Leu (e.g. SEQ ID NO: 169) and/or Trp433→Phe (e.g. SEQ ID NO: 171). These mutations may be combined with C-terminal truncations e.g. to combine a Pro325→Leu mutation with a 7-mer truncation (e.g. SEQ ID NO: 170).

[0117] (4) spr2021

[0118] The original ‘spr2021’ sequence was annotated in reference 84 as ‘General stress protein GSP-781’ (see GI:15904062). For reference purposes, the amino acid sequence of full length spr2021 as found in the R6 strain is given as SEQ ID NO: 11 herein.

[0119] Preferred spr2021 polypeptides for use with the invention comprise an amino acid sequence: (a) having 50% or more identity (e.g. 60%, 65%, 70%, 75%, 80%, 85%, 90%, 91%, 92%, 93%, 94%, 95%, 96%, 97%, 98%, 99%, 99.5% or more) to SEQ ID NO: 11; and/or (b) comprising a fragment of at least ‘n’ consecutive amino acids of SEQ ID NO: 11, wherein ‘n’ is 7 or more (e.g. 8, 10, 12, 14, 16, 18, 20, 25, 30, 35, 40, 50, 60, 70, 80, 90, 100, 150, 200, 250 or more). These spr2021 proteins include variants of SEQ ID NO: 11. Preferred fragments of (b) comprise an epitope from SEQ ID NO: 11. Other preferred fragments lack one or more amino acids (e.g. 1, 2, 3, 4, 5, 6, 7, 8, 9, 10, 15, 20, 25 or more) from the C-terminus and/or one or more amino acids (e.g. 1, 2, 3, 4, 5, 6, 7, 8, 9, 10, 15, 20, 25 or more) from the N-terminus of SEQ ID NO: 11 while retaining at least one epitope of SEQ ID NO: 11. Other fragments omit one or more protein domains. One suitable fragment is SEQ ID NO: 190, which omits the natural leader peptide sequence.

[0120] Combinations of spr2021 with other pneumococcal antigens have shown good synergistic effects.

[0121] Reference 10 annotates spr2021 as a secreted 45 kDa protein with homology to GbpB and discloses its use as an immunogen (SEQ ID NO: 243 therein; SP2216). Immunogenic fragments of spr2021 are identified in table 1 of reference 10 (page 73). Another useful fragment of spr2021 is disclosed as SEQ ID NO: 1 of reference 59 (amino acids 28-278 of SEQ ID NO: 11 herein).

[0122] Third Antigen Group

[0123] (1) spr0096

[0124] The original ‘spr0096’ sequence was annotated in reference 84 as ‘hypothetical protein’ (see GI:15902140). For reference purposes, the amino acid sequence of full length spr0096 as found in the R6 strain is given as SEQ ID NO: 12 herein.

[0125] Preferred spr0096 polypeptides for use with the invention comprise an amino acid sequence: (a) having 50% or more identity (e.g. 60%, 65%, 70%, 75%, 80%, 85%, 90%, 91%, 92%, 93%, 94%, 95%, 96%, 97%, 98%, 99%, 99.5% or more) to SEQ ID NO: 12; and/or (b) comprising a fragment of at least ‘n’ consecutive amino acids of SEQ ID NO: 12, wherein ‘n’ is 7 or more (e.g. 8, 10, 12, 14, 16, 18, 20, 25, 30, 35, 40, 50, 60, 70, 80, 90, 100, 150, 200, 250 or more). These spr0096 proteins include variants of SEQ ID NO: 12 (e.g. SEQ ID NO: 40; see below). Preferred fragments of (b) comprise an epitope from SEQ ID NO: 12. Other preferred fragments lack one or more amino acids (e.g. 1, 2, 3, 4, 5, 6, 7, 8, 9, 10, 15, 20, 25 or more) from the C-terminus and/or one or more amino acids (e.g. 1, 2, 3, 4, 5, 6, 7, 8, 9, 10, 15, 20, 25 or more) from the N-terminus of SEQ ID NO: 12 while retaining at least one epitope of SEQ ID NO: 12. Other fragments omit one or more protein domains.

[0126] Combinations of spr0096 with other pneumococcal antigens have shown good synergistic effects.

[0127] A variant form of spr0096, with an insert near its C-terminus relative to SEQ ID NO: 12, is SEQ ID NO: 40 herein. The use of this variant for immunisation is reported in reference 10 (SEQ ID NO: 150 therein), where it is annotated as a LysM domain protein. Thus a spr0096 for use with the invention may comprise an amino acid sequence: (a) having 50% or more identity (e.g. 60%, 65%, 70%, 75%, 80%, 85%, 90%, 91%, 92%, 93%, 94%, 95%, 96%, 97%, 98%, 99%, 99.5% or more) to SEQ ID NO: 40; and/or (b) comprising a fragment of at least ‘n’ consecutive amino acids of SEQ ID NO: 40, wherein ‘n’ is 7 or more (e.g. 8, 10, 12, 14, 16, 18, 20, 25, 30, 35, 40, 50, 60, 70, 80, 90, 100, 150, 200, 250 or more). These polypeptides include variants of SEQ ID NO: 40. Preferred fragments of (b) comprise an epitope from SEQ ID NO: 40. Other preferred fragments lack one or more amino acids (e.g. 1, 2, 3, 4, 5, 6, 7, 8, 9, 10, 15, 20, 25 or more) from the C-terminus and/or one or more amino acids (e.g. 1, 2, 3, 4, 5, 6, 7, 8, 9, 10, 15, 20, 25 or more) from the N-terminus of SEQ ID NO: 40 while retaining at least one epitope of SEQ ID NO: 40. Other fragments omit one or more protein domains. Immunogenic fragments of SEQ ID NO: 40 are identified in table 1 of reference 10.

[0128] A spr0096 polypeptide may be used in the form of a dimer e.g. a homodimer.

[0129] (2) spr1433

[0130] The original ‘spr1433’ sequence was annotated in reference 84 as ‘hypothetical protein’ (see GI:15903476). For reference purposes, the amino acid sequence of full length spr1433 as found in the R6 strain is given as SEQ ID NO: 13 herein.

[0131] Preferred spr1433 polypeptides for use with the invention comprise an amino acid sequence: (a) having 50% or more identity (e.g. 60%, 65%, 70%, 75%, 80%, 85%, 90%, 91%, 92%, 93%, 94%, 95%, 96%, 97%, 98%, 99%, 99.5% or more) to SEQ ID NO: 13; and/or (b) comprising a fragment of at least ‘n’ consecutive amino acids of SEQ ID NO: 13, wherein ‘n’ is 7 or more (e.g. 8, 10, 12, 14, 16, 18, 20, 25, 30, 35, 40, 50, 60, 70, 80, 90, 100, 150, 200, 250 or more). These spr1433 proteins include variants of SEQ ID NO: 13. Preferred fragments of (b) comprise an epitope from SEQ ID NO: 13. Other preferred fragments lack one or more amino acids (e.g. 1, 2, 3, 4, 5, 6, 7, 8, 9, 10, 15, 20, 25 or more) from the C-terminus and/or one or more amino acids (e.g. 1, 2, 3, 4, 5, 6, 7, 8, 9, 10, 15, 20, 25 or more) from the N-terminus of SEQ ID NO: 13 while retaining at least one epitope of SEQ ID NO: 13. Other fragments omit one or more protein domains.

[0132] (3) spr1707

[0133] The original ‘spr1707’ sequence was annotated in reference 84 as ‘ABC transporter substrate-binding protein-oligopeptide transport’ (see GI:15903749). For reference purposes, the amino acid sequence of full length spr1707 as found in the R6 strain is given as SEQ ID NO: 14 herein.

[0134] Preferred spr1707 polypeptides for use with the invention comprise an amino acid sequence: (a) having 50% or more identity (e.g. 60%, 65%, 70%, 75%, 80%, 85%, 90%, 91%, 92%, 93%, 94%, 95%, 96%, 97%, 98%, 99%, 99.5% or more) to SEQ ID NO: 14; and/or (b) comprising a fragment of at least ‘n’ consecutive amino acids of SEQ ID NO: 14, wherein ‘n’ is 7 or more (e.g. 8, 10, 12, 14, 16, 18, 20, 25, 30, 35, 40, 50, 60, 70, 80, 90, 100, 150, 200, 250 or more). These spr1707 proteins include variants of SEQ ID NO: 14 (e.g. SEQ ID NO: 100; see below). Preferred fragments of (b) comprise an epitope from SEQ ID NO: 14. Other preferred fragments lack one or more amino acids (e.g. 1, 2, 3, 4, 5, 6, 7, 8, 9, 10, 15, 20, 25 or more) from the C-terminus and/or one or more amino acids (e.g. 1, 2, 3, 4, 5, 6, 7, 8, 9, 10, 15, 20, 25 or more) from the N-terminus of SEQ ID NO: 14 while retaining at least one epitope of SEQ ID NO: 14. Other fragments omit one or more protein domains.

[0135] A variant form of spr1707, differing from SEQ ID NO: 14 by 4 amino acids, is SEQ ID NO: 100 herein. The use of SEQ ID NO: 100 for immunisation is reported in reference 10 (SEQ ID NO: 220 therein). Thus a spr1707 polypeptide for use with the invention may comprise an amino acid sequence: (a) having 50% or more identity (e.g. 60%, 65%, 70%, 75%, 80%, 85%, 90%, 91%, 92%, 93%, 94%, 95%, 96%, 97%, 98%, 99%, 99.5% or more) to SEQ ID NO: 100; and/or (b) comprising a fragment of at least ‘n’ consecutive amino acids of SEQ ID NO: 100, wherein ‘n’ is 7 or more (e.g. 8, 10, 12, 14, 16, 18, 20, 25, 30, 35, 40, 50, 60, 70, 80, 90, 100, 150, 200, 250 or more). These polypeptides include variants of SEQ ID NO: 100. Preferred fragments of (b) comprise an epitope from SEQ ID NO: 100. Other preferred fragments lack one or more amino acids (e.g. 1, 2, 3, 4, 5, 6, 7, 8, 9, 10, 15, 20, 25 or more) from the C-terminus and/or one or more amino acids (e.g. 1, 2, 3, 4, 5, 6, 7, 8, 9, 10, 15, 20, 25 or more) from the N-terminus of SEQ ID NO: 100 while retaining at least one epitope of SEQ ID NO: 100. Other fragments omit one or more protein domains.

[0136] Immunogenic fragments of SEQ ID NO: 100 are identified in table 1 of reference 10.

[0137] Other Pneumococcal Antigens

[0138] ClpP

[0139] ClpP is the ATP-dependent Clp protease proteolytic subunit. For reference purposes, the amino acid sequence of full length CIpP is SEQ ID NO: 16 herein. In the R6 genome ClpP is spr0656 [84].

[0140] Preferred ClpP polypeptides for use with the invention comprise an amino acid sequence: (a) having 50% or more identity (e.g. 60%, 65%, 70%, 75%, 80%, 85%, 90%, 91%, 92%, 93%, 94%, 95%, 96%, 97%, 98%, 99%, 99.5% or more) to SEQ ID NO: 16; and/or (b) comprising a fragment of at least ‘n’ consecutive amino acids of SEQ ID NO: 16, wherein ‘n’ is 7 or more (e.g. 8, 10, 12, 14, 16, 18, 20, 25, 30, 35, 40, 50, 60, 70, 80, 90, 100, 150, 200, 250 or more). These ClpP proteins include variants of SEQ ID NO: 16. Preferred fragments of (b) comprise an epitope from SEQ ID NO: 16. Other preferred fragments lack one or more amino acids (e.g. 1, 2, 3, 4, 5, 6, 7, 8, 9, 10, 15, 20, 25 or more) from the C-terminus and/or one or more amino acids (e.g. 1, 2, 3, 4, 5, 6, 7, 8, 9, 10, 15, 20, 25 or more) from the N-terminus of SEQ ID NO: 16 while retaining at least one epitope of SEQ ID NO: 16. Other fragments omit one or more protein domains.

[0141] The use of ClpP for immunisation is reported in references 60 and 61. It may advantageously be used in combination with PspA and PsaA and/or PspC [60].

[0142] LytA

[0143] LytA is the N-acetylmuramoyl-L-alanine amidase (autolysin). For reference purposes, the amino acid sequence of full length LytA is SEQ ID NO: 17 herein. In the R6 genome LytA is spr1754 [84].

[0144] Preferred LytA polypeptides for use with the invention comprise an amino acid sequence: (a) having 50% or more identity (e.g. 60%, 65%, 70%, 75%, 80%, 85%, 90%, 91%, 92%, 93%, 94%, 95%, 96%, 97%, 98%, 99%, 99.5% or more) to SEQ ID NO: 17; and/or (b) comprising a fragment of at least ‘n’ consecutive amino acids of SEQ ID NO: 17, wherein ‘n’ is 7 or more (e.g. 8, 10, 12, 14, 16, 18, 20, 25, 30, 35, 40, 50, 60, 70, 80, 90, 100, 150, 200, 250 or more). These LytA proteins include variants of SEQ ID NO: 17 (e.g. GI:18568354). Preferred fragments of (b) comprise an epitope from SEQ ID NO: 17. Other preferred fragments lack one or more amino acids (e.g. 1, 2, 3, 4, 5, 6, 7, 8, 9, 10, 15, 20, 25 or more) from the C-terminus and/or one or more amino acids (e.g. 1, 2, 3, 4, 5, 6, 7, 8, 9, 10, 15, 20, 25 or more) from the N-terminus of SEQ ID NO: 17 while retaining at least one epitope of SEQ ID NO: 17. Other fragments omit one or more protein domains.

[0145] The use of LytA for immunisation is reported in reference 62, particularly in a form comprising the LytA choline binding domain fused to a heterologous promiscuous T helper epitope.

[0146] PhtA

[0147] PhtA is the Pneumococcal histidine triad protein A. For reference purposes, the amino acid sequence of full length PhtA precursor is SEQ ID NO: 18 herein. In the R6 genome PhtA is spr1061 [84].

[0148] Preferred PhtA polypeptides for use with the invention comprise an amino acid sequence: (a) having 50% or more identity (e.g. 60%, 65%, 70%, 75%, 80%, 85%, 90%, 91%, 92%, 93%, 94%, 95%, 96%, 97%, 98%, 99%, 99.5% or more) to SEQ ID NO: 18; and/or (b) comprising a fragment of at least ‘n’ consecutive amino acids of SEQ ID NO: 18, wherein ‘n’ is 7 or more (e.g. 8, 10, 12, 14, 16, 18, 20, 25, 30, 35, 40, 50, 60, 70, 80, 90, 100, 150, 200, 250 or more). These PhtA proteins include variants of SEQ ID NO: 18. Preferred fragments of (b) comprise an epitope from SEQ ID NO: 18. Other preferred fragments lack one or more amino acids (e.g. 1, 2, 3, 4, 5, 6, 7, 8, 9, 10, 15, 20, 25 or more) from the C-terminus and/or one or more amino acids (e.g. 1, 2, 3, 4, 5, 6, 7, 8, 9, 10, 15, 20, 25 or more) from the N-terminus of SEQ ID NO: 18 while retaining at least one epitope of SEQ ID NO: 18. Other fragments omit one or more protein domains.

[0149] The use of PhtA for immunisation is reported in references 63 and 64.

[0150] PhtB

[0151] PhtB is the pneumococcal histidine triad protein B. For reference purposes, the amino acid sequence of full length PhtB precursor is SEQ ID NO: 19 herein. Xaa at residue 578 can be Lysine.

[0152] Preferred PhtB polypeptides for use with the invention comprise an amino acid sequence: (a) having 50% or more identity (e.g. 60%, 65%, 70%, 75%, 80%, 85%, 90%, 91%, 92%, 93%, 94%, 95%, 96%, 97%, 98%, 99%, 99.5% or more) to SEQ ID NO: 19; and/or (b) comprising a fragment of at least ‘n’ consecutive amino acids of SEQ ID NO: 19, wherein ‘n’ is 7 or more (e.g. 8, 10, 12, 14, 16, 18, 20, 25, 30, 35, 40, 50, 60, 70, 80, 90, 100, 150, 200, 250 or more). These PhtB proteins include variants of SEQ ID NO: 19. Preferred fragments of (b) comprise an epitope from SEQ ID NO: 19. Other preferred fragments lack one or more amino acids (e.g. 1, 2, 3, 4, 5, 6, 7, 8, 9, 10, 15, 20, 25 or more) from the C-terminus and/or one or more amino acids (e.g. 1, 2, 3, 4, 5, 6, 7, 8, 9, 10, 15, 20, 25 or more) from the N-terminus of SEQ ID NO: 19 while retaining at least one epitope of SEQ ID NO: 19. Other fragments omit one or more protein domains.

[0153] The use of PhtB for immunisation is reported in reference 2, 63 and 64.

[0154] PhtD

[0155] PhtD is the Pneumococcal histidine triad protein D. For reference purposes, the amino acid sequence of full length PhtD precursor is SEQ ID NO: 20 herein. In the R6 genome PhtD is spr0907 [84].

[0156] Preferred PhtD polypeptides for use with the invention comprise an amino acid sequence: (a) having 50% or more identity (e.g. 60%, 65%, 70%, 75%, 80%, 85%, 90%, 91%, 92%, 93%, 94%, 95%, 96%, 97%, 98%, 99%, 99.5% or more) to SEQ ID NO: 20; and/or (b) comprising a fragment of at least ‘n’ consecutive amino acids of SEQ ID NO: 20, wherein ‘n’ is 7 or more (e.g. 8, 10, 12, 14, 16, 18, 20, 25, 30, 35, 40, 50, 60, 70, 80, 90, 100, 150, 200, 250 or more). These PhtD proteins include variants of SEQ ID NO: 20. Preferred fragments of (b) comprise an epitope from SEQ ID NO: 20. Other preferred fragments lack one or more amino acids (e.g. 1, 2, 3, 4, 5, 6, 7, 8, 9, 10, 15, 20, 25 or more) from the C-terminus and/or one or more amino acids (e.g. 1, 2, 3, 4, 5, 6, 7, 8, 9, 10, 15, 20, 25 or more) from the N-terminus of SEQ ID NO: 20 while retaining at least one epitope of SEQ ID NO: 20. Other fragments omit one or more protein domains.

[0157] The use of PhtD for immunisation is reported in references 63, 64 and 65.

[0158] PhtE

[0159] PhtE is the Pneumococcal histidine triad protein E. For reference purposes, the amino acid sequence of full length PhtE precursor is SEQ ID NO: 21 herein. In the R6 genome PhtE is spr0908 [84].

[0160] Preferred PhtE polypeptides for use with the invention comprise an amino acid sequence: (a) having 50% or more identity (e.g. 60%, 65%, 70%, 75%, 80%, 85%, 90%, 91%, 92%, 93%, 94%, 95%, 96%, 97%, 98%, 99%, 99.5% or more) to SEQ ID NO: 21; and/or (b) comprising a fragment of at least ‘n’ consecutive amino acids of SEQ ID NO: 21, wherein ‘n’ is 7 or more (e.g. 8, 10, 12, 14, 16, 18, 20, 25, 30, 35, 40, 50, 60, 70, 80, 90, 100, 150, 200, 250 or more). These PhtE proteins include variants of SEQ ID NO: 21. Preferred fragments of (b) comprise an epitope from SEQ ID NO: 21. Other preferred fragments lack one or more amino acids (e.g. 1, 2, 3, 4, 5, 6, 7, 8, 9, 10, 15, 20, 25 or more) from the C-terminus and/or one or more amino acids (e.g. 1, 2, 3, 4, 5, 6, 7, 8, 9, 10, 15, 20, 25 or more) from the N-terminus of SEQ ID NO: 21 while retaining at least one epitope of SEQ ID NO: 21. Other fragments omit one or more protein domains.

[0161] The use of PhtE for immunisation is reported in references 63 and 64.

[0162] ZmpB

[0163] ZmpB is the zinc metalloprotease. For reference purposes, the amino acid sequence of full length ZmpB is SEQ ID NO: 22 herein. In the R6 genome ZmpB is spr0581 [84].

[0164] Preferred ZmpB polypeptides for use with the invention comprise an amino acid sequence: (a) having 50% or more identity (e.g. 60%, 65%, 70%, 75%, 80%, 85%, 90%, 91%, 92%, 93%, 94%, 95%, 96%, 97%, 98%, 99%, 99.5% or more) to SEQ ID NO: 22; and/or (b) comprising a fragment of at least ‘n’ consecutive amino acids of SEQ ID NO: 22, wherein ‘n’ is 7 or more (e.g. 8, 10, 12, 14, 16, 18, 20, 25, 30, 35, 40, 50, 60, 70, 80, 90, 100, 150, 200, 250 or more). These ZmpB proteins include variants of SEQ ID NO: 22. Preferred fragments of (b) comprise an epitope from SEQ ID NO: 22. Other preferred fragments lack one or more amino acids (e.g. 1, 2, 3, 4, 5, 6, 7, 8, 9, 10, 15, 20, 25 or more) from the C-terminus and/or one or more amino acids (e.g. 1, 2, 3, 4, 5, 6, 7, 8, 9, 10, 15, 20, 25 or more) from the N-terminus of SEQ ID NO: 22 while retaining at least one epitope of SEQ ID NO: 22. Other fragments omit one or more protein domains.

[0165] CbpD

[0166] CbpD is the Choline binding protein D. For reference purposes, the amino acid sequence of full length CbpD is SEQ ID NO: 23 herein. In the R6 genome CbpD is spr2006 [84].

[0167] Preferred CbpD polypeptides for use with the invention comprise an amino acid sequence: (a) having 50% or more identity (e.g. 60%, 65%, 70%, 75%, 80%, 85%, 90%, 91%, 92%, 93%, 94%, 95%, 96%, 97%, 98%, 99%, 99.5% or more) to SEQ ID NO: 23; and/or (b) comprising a fragment of at least ‘n’ consecutive amino acids of SEQ ID NO: 23, wherein is 7 or more (e.g. 8, 10, 12, 14, 16, 18, 20, 25, 30, 35, 40, 50, 60, 70, 80, 90, 100, 150, 200, 250 or more). These CbpD proteins include variants of SEQ ID NO: 23 (e.g. SEQ ID NO: 119; see below). Preferred fragments of (b) comprise an epitope from SEQ ID NO: 23. Other preferred fragments lack one or more amino acids (e.g. 1, 2, 3, 4, 5, 6, 7, 8, 9, 10, 15, 20, 25 or more) from the C-terminus and/or one or more amino acids (e.g. 1, 2, 3, 4, 5, 6, 7, 8, 9, 10, 15, 20, 25 or more) from the N-terminus of SEQ ID NO: 23 while retaining at least one epitope of SEQ ID NO: 23. Other fragments omit one or more protein domains.

[0168] The use of CbpD for immunisation is reported in reference 67.

[0169] A variant of SEQ ID NO: 23 is SEQ ID NO: 119 herein. The use of SEQ ID NO: 119 for immunisation is reported in reference 10 (SEQ ID NO: 241 therein). Thus a CbpD polypeptide for use with the invention may comprise an amino acid sequence: (a) having 50% or more identity (e.g. 60%, 65%, 70%, 75%, 80%, 85%, 90%, 91%, 92%, 93%, 94%, 95%, 96%, 97%, 98%, 99%, 99.5% or more) to SEQ ID NO: 119; and/or (b) comprising a fragment of at least ‘n’ consecutive amino acids of SEQ ID NO: 119, wherein ‘n’ is 7 or more (e.g. 8, 10, 12, 14, 16, 18, 20, 25, 30, 35, 40, 50, 60, 70, 80, 90, 100, 150, 200, 250 or more). These CbpD proteins include variants of SEQ ID NO: 119. Preferred fragments of (b) comprise an epitope from SEQ ID NO: 119. Other preferred fragments lack one or more amino acids (e.g. 1, 2, 3, 4, 5, 6, 7, 8, 9, 10, 15, 20, 25 or more) from the C-terminus and/or one or more amino acids (e.g. 1, 2, 3, 4, 5, 6, 7, 8, 9, 10, 15, 20, 25 or more) from the N-terminus of SEQ ID NO: 119 while retaining at least one epitope of SEQ ID NO: 119. Other fragments omit one or more protein domains.

[0170] Immunogenic fragments of SEQ ID NO: 119 are identified in table 1 of reference 10.

[0171] CbpG

[0172] CbpG is the Choline binding protein G. For reference purposes, the amino acid sequence of full length CbpG is SEQ ID NO: 24 herein. In the R6 genome CbpG is spr0350 [84].

[0173] Preferred CbpG polypeptides for use with the invention comprise an amino acid sequence: (a) having 50% or more identity (e.g. 60%, 65%, 70%, 75%, 80%, 85%, 90%, 91%, 92%, 93%, 94%, 95%, 96%, 97%, 98%, 99%, 99.5% or more) to SEQ ID NO: 24; and/or (b) comprising a fragment of at least ‘n’ consecutive amino acids of SEQ ID NO: 24, wherein ‘n’ is 7 or more (e.g. 8, 10, 12, 14, 16, 18, 20, 25, 30, 35, 40, 50, 60, 70, 80, 90, 100, 150, 200, 250 or more). These CbpG proteins include variants of SEQ ID NO: 24. Preferred fragments of (b) comprise an epitope from SEQ ID NO: 24. Other preferred fragments lack one or more amino acids (e.g. 1, 2, 3, 4, 5, 6, 7, 8, 9, 10, 15, 20, 25 or more) from the C-terminus and/or one or more amino acids (e.g. 1, 2, 3, 4, 5, 6, 7, 8, 9, 10, 15, 20, 25 or more) from the N-terminus of SEQ ID NO: 24 while retaining at least one epitope of SEQ ID NO: 24. Other fragments omit one or more protein domains.

[0174] The use of CbpG for immunisation is reported in reference 67.

[0175] PvaA

[0176] PvaA (Streptococcus pneumoniae pneumococcal vaccine antigen A) is also known as sp101. For reference purposes, the amino acid sequence of full length PvaA is SEQ ID NO: 25 herein. In the R6 genome PvaA is spr0930 [84].

[0177] Preferred PvaA polypeptides for use with the invention comprise an amino acid sequence: (a) having 50% or more identity (e.g. 60%, 65%, 70%, 75%, 80%, 85%, 90%, 91%, 92%, 93%, 94%, 95%, 96%, 97%, 98%, 99%, 99.5% or more) to SEQ ID NO: 25; and/or (b) comprising a fragment of at least ‘n’ consecutive amino acids of SEQ ID NO: 25, wherein ‘n’ is 7 or more (e.g. 8, 10, 12, 14, 16, 18, 20, 25, 30, 35, 40, 50, 60, 70, 80, 90, 100, 150, 200, 250 or more). These PvaA proteins include variants of SEQ ID NO: 25. Preferred fragments of (b) comprise an epitope from SEQ ID NO: 25. Other preferred fragments lack one or more amino acids (e.g. 1, 2, 3, 4, 5, 6, 7, 8, 9, 10, 15, 20, 25 or more) from the C-terminus and/or one or more amino acids (e.g. 1, 2, 3, 4, 5, 6, 7, 8, 9, 10, 15, 20, 25 or more) from the N-terminus of SEQ ID NO: 25 while retaining at least one epitope of SEQ ID NO: 25. Other fragments omit one or more protein domains.

[0178] The use of PvaA for immunisation is reported in references 1 and 318.

[0179] CPL1

[0180] CPL1 is the pneumococcal phage CPI lysozyme. For reference purposes, the amino acid sequence of full length CPL1 is SEQ ID NO: 26 herein.

[0181] Preferred CPL1 polypeptides for use with the invention comprise an amino acid sequence: (a) having 50% or more identity (e.g. 60%, 65%, 70%, 75%, 80%, 85%, 90%, 91%, 92%, 93%, 94%, 95%, 96%, 97%, 98%, 99%, 99.5% or more) to SEQ ID NO: 26; and/or (b) comprising a fragment of at least ‘n’ consecutive amino acids of SEQ ID NO: 26, wherein ‘n’ is 7 or more (e.g. 8, 10, 12, 14, 16, 18, 20, 25, 30, 35, 40, 50, 60, 70, 80, 90, 100, 150, 200, 250 or more). These CPL1 proteins include variants of SEQ ID NO: 26. Preferred fragments of (b) comprise an epitope from SEQ ID NO: 26. Other preferred fragments lack one or more amino acids (e.g. 1, 2, 3, 4, 5, 6, 7, 8, 9, 10, 15, 20, 25 or more) from the C-terminus and/or one or more amino acids (e.g. 1, 2, 3, 4, 5, 6, 7, 8, 9, 10, 15, 20, 25 or more) from the N-terminus of SEQ ID NO: 26 while retaining at least one epitope of SEQ ID NO: 26. Other fragments omit one or more protein domains.

[0182] The use of CPL1 for immunisation is reported in reference 62, particularly in a form comprising the CPL1 choline binding domain fused to a heterologous promiscuous T helper epitope.

[0183] PspC

[0184] PspC is the pneumococcal surface protein C [66] and is also known as choline-binding protein A (CbpA). Its use for immunisation is reported in references 1 and 67. In the R6 strain it is spr1995 and, for reference, the amino acid sequence of full length spr1995 is SEQ ID NO: 15 herein.

[0185] Preferred PspC polypeptides for use with the invention comprise an amino acid sequence: (a) having 50% or more identity (e.g. 60%, 65%, 70%, 75%, 80%, 85%, 90%, 91%, 92%, 93%, 94%, 95%, 96%, 97%, 98%, 99%, 99.5% or more) to SEQ ID NO: 15; and/or (b) comprising a fragment of at least ‘n’ consecutive amino acids of SEQ ID NO: 15, wherein ‘n’ is 7 or more (e.g. 8, 10, 12, 14, 16, 18, 20, 25, 30, 35, 40, 50, 60, 70, 80, 90, 100, 150, 200, 250 or more). These spr1995 proteins include variants of SEQ ID NO: 15 (e.g. SEQ ID NO: 27; see below). Preferred fragments of (b) comprise an epitope from SEQ ID NO: 15. Other preferred fragments lack one or more amino acids (e.g. 1, 2, 3, 4, 5, 6, 7, 8, 9, 10, 15, 20, 25 or more) from the C-terminus and/or one or more amino acids (e.g. 1, 2, 3, 4, 5, 6, 7, 8, 9, 10, 15, 20, 25 or more) from the N-terminus of SEQ ID NO: 15 while retaining at least one epitope of SEQ ID NO: 15. Other fragments omit one or more protein domains.

[0186] A variant of PspC is known as ‘Hic’. It is similar to PspC, as shown in FIG. 1 of reference 68, where it is reported to bind to factor H (fH). For reference purposes, the amino acid sequence of full length Hic is SEQ ID NO: 27 herein. A Hic protein may be used with the invention in addition to or in place of a PspC polypeptide.

[0187] Preferred Hic polypeptides for use with the invention comprise an amino acid sequence: (a) having 50% or more identity (e.g. 60%, 65%, 70%, 75%, 80%, 85%, 90%, 91%, 92%, 93%, 94%, 95%, 96%, 97%, 98%, 99%, 99.5% or more) to SEQ ID NO: 27; and/or (b) comprising a fragment of at least ‘n’ consecutive amino acids of SEQ ID NO: 27, wherein ‘n’ is 7 or more (e.g. 8, 10, 12, 14, 16, 18, 20, 25, 30, 35, 40, 50, 60, 70, 80, 90, 100, 150, 200, 250 or more). These Hic proteins include variants of SEQ ID NO: 27. Preferred fragments of (b) comprise an epitope from SEQ ID NO: 27. Other preferred fragments lack one or more amino acids (e.g. 1, 2, 3, 4, 5, 6, 7, 8, 9, 10, 15, 20, 25 or more) from the C-terminus and/or one or more amino acids (e.g. 1, 2, 3, 4, 5, 6, 7, 8, 9, 10, 15, 20, 25 or more) from the N-terminus of SEQ ID NO: 27 while retaining at least one epitope of SEQ ID NO: 27. Other fragments omit one or more protein domains.

[0188] PspC and/or Hic can advantageously be used in combination with PspA and/or PsaA.

[0189] Pmp

[0190] Pmp is a peptidylprolyl isomerase, also known as protease maturation protein. For reference purposes, the amino acid sequence of full length Pmp is SEQ ID NO: 28 herein. In the R6 genome Pmp is spr0884 [84].

[0191] Preferred Pmp polypeptides for use with the invention comprise an amino acid sequence: (a) having 50% or more identity (e.g. 60%, 65%, 70%, 75%, 80%, 85%, 90%, 91%, 92%, 93%, 94%, 95%, 96%, 97%, 98%, 99%, 99.5% or more) to SEQ ID NO: 28; and/or (b) comprising a fragment of at least ‘n’ consecutive amino acids of SEQ ID NO: 28, wherein ‘n’ is 7 or more (e.g. 8, 10, 12, 14, 16, 18, 20, 25, 30, 35, 40, 50, 60, 70, 80, 90, 100, 150, 200, 250 or more). These Pmp proteins include variants of SEQ ID NO: 28. Preferred fragments of (b) comprise an epitope from SEQ ID NO: 28. Other preferred fragments lack one or more amino acids (e.g. 1, 2, 3, 4, 5, 6, 7, 8, 9, 10, 15, 20, 25 or more) from the C-terminus and/or one or more amino acids (e.g. 1, 2, 3, 4, 5, 6, 7, 8, 9, 10, 15, 20, 25 or more) from the N-terminus of SEQ ID NO: 28 while retaining at least one epitope of SEQ ID NO: 28. Other fragments omit one or more protein domains. One suitable fragment is SEQ ID NO: 186, which omits the natural leader peptide sequence.

[0192] The use of Pmp for immunisation is reported in reference 69.

[0193] PspA

[0194] PspA is the Pneumococcal surface protein A. For reference purposes, the amino acid sequence of full length PspA is SEQ ID NO: 29 herein. In the R6 genome PspA is spr0121 [84].

[0195] Preferred PspA polypeptides for use with the invention comprise an amino acid sequence: (a) having 50% or more identity (e.g. 60%, 65%, 70%, 75%, 80%, 85%, 90%, 91%, 92%, 93%, 94%, 95%, 96%, 97%, 98%, 99%, 99.5% or more) to SEQ ID NO: 29; and/or (b) comprising a fragment of at least ‘n’ consecutive amino acids of SEQ ID NO: 29, wherein ‘n’ is 7 or more (e.g. 8, 10, 12, 14, 16, 18, 20, 25, 30, 35, 40, 50, 60, 70, 80, 90, 100, 150, 200, 250 or more). These PspA proteins include variants of SEQ ID NO: 29. Preferred fragments of (b) comprise an epitope from SEQ ID NO: 29. Other preferred fragments lack one or more amino acids (e.g. 1, 2, 3, 4, 5, 6, 7, 8, 9, 10, 15, 20, 25 or more) from the C-terminus and/or one or more amino acids (e.g. 1, 2, 3, 4, 5, 6, 7, 8, 9, 10, 15, 20, 25 or more) from the N-terminus of SEQ ID NO: 29 while retaining at least one epitope of SEQ ID NO: 29. Other fragments omit one or more protein domains.

[0196] The use of PspA for immunisation is reported inter alia in reference 70. It can advantageously be administered in combination with PspC.

[0197] PsaA

[0198] PsaA is the Pneumococcal surface adhesin. For reference purposes, the amino acid sequence of full length PsaA is SEQ ID NO: 30 herein.

[0199] Preferred PsaA polypeptides for use with the invention comprise an amino acid sequence: (a) having 50% or more identity (e.g. 60%, 65%, 70%, 75%, 80%, 85%, 90%, 91%, 92%, 93%, 94%, 95%, 96%, 97%, 98%, 99%, 99.5% or more) to SEQ ID NO: 30; and/or (b) comprising a fragment of at least ‘n’ consecutive amino acids of SEQ ID NO: 30, wherein ‘n’ is 7 or more (e.g. 8, 10, 12, 14, 16, 18, 20, 25, 30, 35, 40, 50, 60, 70, 80, 90, 100, 150, 200, 250 or more). These PsaA proteins include variants of SEQ ID NO: 30. Preferred fragments of (b) comprise an epitope from SEQ ID NO: 30. Other preferred fragments lack one or more amino acids (e.g. 1, 2, 3, 4, 5, 6, 7, 8, 9, 10, 15, 20, 25 or more) from the C-terminus and/or one or more amino acids (e.g. 1, 2, 3, 4, 5, 6, 7, 8, 9, 10, 15, 20, 25 or more) from the N-terminus of SEQ ID NO: 30 while retaining at least one epitope of SEQ ID NO: 30. Other fragments omit one or more protein domains. A useful fragment of PsaA is disclosed as SEQ ID NO: 3 in reference 59 (corresponding to amino acids 21-309 of SEQ ID NO: 30 herein).

[0200] The use of PsaA for immunisation is reported in reference 71. It can be used in combination with PspA and/or PspC.

[0201] PrtA

[0202] PrtA is the cell wall-associated serine proteinase. It has also been known as sp128 and sp130, and is in a subtilisin-like serine protease. For reference purposes, the amino acid sequence of full length PrtA precursor is SEQ ID NO: 31 herein. In the R6 genome PrtA is spr0561 [84].

[0203] Preferred PrtA polypeptides for use with the invention comprise an amino acid sequence: (a) having 50% or more identity (e.g. 60%, 65%, 70%, 75%, 80%, 85%, 90%, 91%, 92%, 93%, 94%, 95%, 96%, 97%, 98%, 99%, 99.5% or more) to SEQ ID NO: 31; and/or (b) comprising a fragment of at least ‘n’ consecutive amino acids of SEQ ID NO: 31, wherein ‘n’ is 7 or more (e.g. 8, 10, 12, 14, 16, 18, 20, 25, 30, 35, 40, 50, 60, 70, 80, 90, 100, 150, 200, 250 or more). These PrtA proteins include variants of SEQ ID NO: 31. Preferred fragments of (b) comprise an epitope from SEQ ID NO: 31. Other preferred fragments lack one or more amino acids (e.g. 1, 2, 3, 4, 5, 6, 7, 8, 9, 10, 15, 20, 25 or more) from the C-terminus and/or one or more amino acids (e.g. 1, 2, 3, 4, 5, 6, 7, 8, 9, 10, 15, 20, 25 or more) from the N-terminus of SEQ ID NO: 31 while retaining at least one epitope of SEQ ID NO: 31. Other fragments omit one or more protein domains.

[0204] The use of PrtA for immunisation is reported in references 72 & 73, and also in reference 1.

[0205] Sp133

[0206] Sp133 is a conserved pneumococcal antigen. For reference purposes, the amino acid sequence of full length Sp133 is SEQ ID NO: 32 herein. In the R6 genome Sp133 is spr0931 [84].

[0207] Preferred Sp133 polypeptides for use with the invention comprise an amino acid sequence: (a) having 50% or more identity (e.g. 60%, 65%, 70%, 75%, 80%, 85%, 90%, 91%, 92%, 93%, 94%, 95%, 96%, 97%, 98%, 99%, 99.5% or more) to SEQ ID NO: 32; and/or (b) comprising a fragment of at least ‘n’ consecutive amino acids of SEQ ID NO: 32, wherein ‘n’ is 7 or more (e.g. 8, 10, 12, 14, 16, 18, 20, 25, 30, 35, 40, 50, 60, 70, 80, 90, 100, 150, 200, 250 or more). These Sp133 proteins include variants of SEQ ID NO: 32. Preferred fragments of (b) comprise an epitope from SEQ ID NO: 32. Other preferred fragments lack one or more amino acids (e.g. 1, 2, 3, 4, 5, 6, 7, 8, 9, 10, 15, 20, 25 or more) from the C-terminus and/or one or more amino acids (e.g. 1, 2, 3, 4, 5, 6, 7, 8, 9, 10, 15, 20, 25 or more) from the N-terminus of SEQ ID NO: 32 while retaining at least one epitope of SEQ ID NO: 32. Other fragments omit one or more protein domains.

[0208] The use of Sp133 for immunisation is reported in reference 74.

[0209] PiaA

[0210] PiaA is the membrane permease involved in iron acquisition by pneumococcus. For reference purposes, the amino acid sequence of full length PiaA is SEQ ID NO: 33 herein. In the R6 genome PiaA is spr0935 [84].

[0211] Preferred PiaA polypeptides for use with the invention comprise an amino acid sequence: (a) having 50% or more identity (e.g. 60%, 65%, 70%, 75%, 80%, 85%, 90%, 91%, 92%, 93%, 94%, 95%, 96%, 97%, 98%, 99%, 99.5% or more) to SEQ ID NO: 33; and/or (b) comprising a fragment of at least ‘n’ consecutive amino acids of SEQ ID NO: 33, wherein ‘n’ is 7 or more (e.g. 8, 10, 12, 14, 16, 18, 20, 25, 30, 35, 40, 50, 60, 70, 80, 90, 100, 150, 200, 250 or more). These PiaA proteins include variants of SEQ ID NO: 33. Preferred fragments of (b) comprise an epitope from SEQ ID NO: 33. Other preferred fragments lack one or more amino acids (e.g. 1, 2, 3, 4, 5, 6, 7, 8, 9, 10, 15, 20, 25 or more) from the C-terminus and/or one or more amino acids (e.g. 1, 2, 3, 4, 5, 6, 7, 8, 9, 10, 15, 20, 25 or more) from the N-terminus of SEQ ID NO: 33 while retaining at least one epitope of SEQ ID NO: 33. Other fragments omit one or more protein domains.

[0212] The use of PiaA for immunisation is reported in references 75, 76 and 77, particularly in combination with PiuA.

[0213] PiuA

[0214] PiuA is the ABC transporter substrate-binding protein for ferric iron transport. It is also known as FatB. For reference purposes, the amino acid sequence of full length PiuA is SEQ ID NO: 34 herein. In the R6 genome PiuA is spr1687 [84].

[0215] Preferred PiuA polypeptides for use with the invention comprise an amino acid sequence: (a) having 50% or more identity (e.g. 60%, 65%, 70%, 75%, 80%, 85%, 90%, 91%, 92%, 93%, 94%, 95%, 96%, 97%, 98%, 99%, 99.5% or more) to SEQ ID NO: 34; and/or (b) comprising a fragment of at least ‘n’ consecutive amino acids of SEQ ID NO: 34, wherein ‘n’ is 7 or more (e.g. 8, 10, 12, 14, 16, 18, 20, 25, 30, 35, 40, 50, 60, 70, 80, 90, 100, 150, 200, 250 or more). These PiuA proteins include variants of SEQ ID NO: 34. Preferred fragments of (b) comprise an epitope from SEQ ID NO: 34. Other preferred fragments lack one or more amino acids (e.g. 1, 2, 3, 4, 5, 6, 7, 8, 9, 10, 15, 20, 25 or more) from the C-terminus and/or one or more amino acids (e.g. 1, 2, 3, 4, 5, 6, 7, 8, 9, 10, 15, 20, 25 or more) from the N-terminus of SEQ ID NO: 34 while retaining at least one epitope of SEQ ID NO: 34. Other fragments omit one or more protein domains.

[0216] The use of PiuA for immunisation is reported in refs 75 to 77, particularly in combination with PiaA.

[0217] IC1

[0218] IC1 is annotated in reference 10 as a hypothetical protein. For reference purposes, the amino acid sequence of full length IC1 is SEQ ID NO: 35 herein. In the R6 genome IC1 is spr0008 [84]. The use of IC1 for immunisation is reported in reference 10 (SEQ ID NO: 145 therein).

[0219] Preferred IC1 polypeptides for use with the invention comprise an amino acid sequence: (a) having 50% or more identity (e.g. 60%, 65%, 70%, 75%, 80%, 85%, 90%, 91%, 92%, 93%, 94%, 95%, 96%, 97%, 98%, 99%, 99.5% or more) to SEQ ID NO: 35; and/or (b) comprising a fragment of at least ‘n’ consecutive amino acids of SEQ ID NO: 35, wherein ‘n’ is 7 or more (e.g. 8, 10, 12, 14, 16, 18, 20, 25, 30, 35, 40, 50, 60, 70, 80, 90, 100, 150, 200, 250 or more). These IC1 proteins include variants of SEQ ID NO: 35. Preferred fragments of (b) comprise an epitope from SEQ ID NO: 35. Other preferred fragments lack one or more amino acids (e.g. 1, 2, 3, 4, 5, 6, 7, 8, 9, 10, 15, 20, 25 or more) from the C-terminus and/or one or more amino acids (e.g. 1, 2, 3, 4, 5, 6, 7, 8, 9, 10, 15, 20, 25 or more) from the N-terminus of SEQ ID NO: 35 while retaining at least one epitope of SEQ ID NO: 35. Other fragments omit one or more protein domains. Immunogenic fragments of IC1 are identified in table 1 of reference 10.

[0220] IC2

[0221] IC2 is the polA DNA polymerase I. For reference purposes, the amino acid sequence of full length IC2 is SEQ ID NO: 36 herein. In the R6 genome IC2 is spr0032 [84]. The use of IC2 for immunisation is reported in reference 10 (SEQ ID NO: 146 therein).

[0222] Preferred IC2 polypeptides for use with the invention comprise an amino acid sequence: (a) having 50% or more identity (e.g. 60%, 65%, 70%, 75%, 80%, 85%, 90%, 91%, 92%, 93%, 94%, 95%, 96%, 97%, 98%, 99%, 99.5% or more) to SEQ ID NO: 36; and/or (b) comprising a fragment of at least ‘n’ consecutive amino acids of SEQ ID NO: 36, wherein ‘n’ is 7 or more (e.g. 8, 10, 12, 14, 16, 18, 20, 25, 30, 35, 40, 50, 60, 70, 80, 90, 100, 150, 200, 250 or more). These IC2 proteins include variants of SEQ ID NO: 36. Preferred fragments of (b) comprise an epitope from SEQ ID NO: 36. Other preferred fragments lack one or more amino acids (e.g. 1, 2, 3, 4, 5, 6, 7, 8, 9, 10, 15, 20, 25 or more) from the C-terminus and/or one or more amino acids (e.g. 1, 2, 3, 4, 5, 6, 7, 8, 9, 10, 15, 20, 25 or more) from the N-terminus of SEQ ID NO: 36 while retaining at least one epitope of SEQ ID NO: 36. Other fragments omit one or more protein domains. Immunogenic fragments of IC2 are identified in table 1 of reference 10.

[0223] IC3

[0224] IC3 is a choline-binding protein. For reference purposes, the amino acid sequence of full length IC3 is SEQ ID NO: 37 herein. In the R6 genome IC3 is spr1945 [84]. The use of IC3 for immunisation is reported in reference 10 (SEQ ID NO: 147 therein).

[0225] Preferred IC3 polypeptides for use with the invention comprise an amino acid sequence: (a) having 50% or more identity (e.g. 60%, 65%, 70%, 75%, 80%, 85%, 90%, 91%, 92%, 93%, 94%, 95%, 96%, 97%, 98%, 99%, 99.5% or more) to SEQ ID NO: 37; and/or (b) comprising a fragment of at least ‘n’ consecutive amino acids of SEQ ID NO: 37, wherein ‘n’ is 7 or more (e.g. 8, 10, 12, 14, 16, 18, 20, 25, 30, 35, 40, 50, 60, 70, 80, 90, 100, 150, 200, 250 or more). These IC3 proteins include variants of SEQ ID NO: 37. Preferred fragments of (b) comprise an epitope from SEQ ID NO: 37. Other preferred fragments lack one or more amino acids (e.g. 1, 2, 3, 4, 5, 6, 7, 8, 9, 10, 15, 20, 25 or more) from the C-terminus and/or one or more amino acids (e.g. 1, 2, 3, 4, 5, 6, 7, 8, 9, 10, 15, 20, 25 or more) from the N-terminus of SEQ ID NO: 37 while retaining at least one epitope of SEQ ID NO: 37. Other fragments omit one or more protein domains. Immunogenic fragments of IC3 are identified in table 1 of reference 10.

[0226] IC4

[0227] IC4 is an IgA1 protease. For reference purposes, the amino acid sequence of full length IC4 is SEQ ID NO: 38 herein. In the R6 genome IC4 is spr1042 [84]. The use of IC4 for immunisation is reported in reference 10 (SEQ ID NO: 148 therein).

[0228] Preferred IC4 polypeptides for use with the invention comprise an amino acid sequence: (a) having 50% or more identity (e.g. 60%, 65%, 70%, 75%, 80%, 85%, 90%, 91%, 92%, 93%, 94%, 95%, 96%, 97%, 98%, 99%, 99.5% or more) to SEQ ID NO: 38; and/or (b) comprising a fragment of at least ‘n’ consecutive amino acids of SEQ ID NO: 38, wherein ‘n’ is 7 or more (e.g. 8, 10, 12, 14, 16, 18, 20, 25, 30, 35, 40, 50, 60, 70, 80, 90, 100, 150, 200, 250 or more). These IC4 proteins include variants of SEQ ID NO: 38. Preferred fragments of (b) comprise an epitope from SEQ ID NO: 38. Other preferred fragments lack one or more amino acids (e.g. 1, 2, 3, 4, 5, 6, 7, 8, 9, 10, 15, 20, 25 or more) from the C-terminus and/or one or more amino acids (e.g. 1, 2, 3, 4, 5, 6, 7, 8, 9, 10, 15, 20, 25 or more) from the N-terminus of SEQ ID NO: 38 while retaining at least one epitope of SEQ ID NO: 38. Other fragments omit one or more protein domains. Immunogenic fragments of IC4 are identified in table 1 of reference 10.

[0229] IC5

[0230] IC5 is annotated as a hypothetical protein, but is maybe a cell wall surface anchor. For reference purposes, the amino acid sequence of full length IC5 is SEQ ID NO: 39 herein. In the R6 genome IC5 is spr0075 [84]. The use of IC5 for in is reported in reference 10 (SEQ ID NO: 149 therein).

[0231] Preferred IC5 polypeptides for use with the invention comprise an amino acid sequence: (a) having 50% or more identity (e.g. 60%, 65%, 70%, 75%, 80%, 85%, 90%, 91%, 92%, 93%, 94%, 95%, 96%, 97%, 98%, 99%, 99.5% or more) to SEQ ID NO: 39; and/or (b) comprising a fragment of at least ‘n’ consecutive amino acids of SEQ ID NO: 39, wherein ‘n’ is 7 or more (e.g. 8, 10, 12, 14, 16, 18, 20, 25, 30, 35, 40, 50, 60, 70, 80, 90, 100, 150, 200, 250 or more). These IC5 proteins include variants of SEQ ID NO: 39. Preferred fragments of (b) comprise an epitope from SEQ ID NO: 39. Other preferred fragments lack one or more amino acids (e.g. 1, 2, 3, 4, 5, 6, 7, 8, 9, 10, 15, 20, 25 or more) from the C-terminus and/or one or more amino acids (e.g. 1, 2, 3, 4, 5, 6, 7, 8, 9, 10, 15, 20, 25 or more) from the N-terminus of SEQ ID NO: 39 while retaining at least one epitope of SEQ ID NO: 39. Other fragments omit one or more protein domains. Immunogenic fragments of IC5 are identified in table 1 of reference 10.

[0232] IC6

[0233] IC6 is a variant form of spr0096, as reported above (SEQ ID NO: 40 herein). Useful IC6 polypeptides for use with the invention comprise an amino acid sequence: (a) having 50% or more identity (e.g. 60%, 65%, 70%, 75%, 80%, 85%, 90%, 91%, 92%, 93%, 94%, 95%, 96%, 97%, 98%, 99%, 99.5% or more) to SEQ ID NO: 40; and/or (b) comprising a fragment of at least ‘n’ consecutive amino acids of SEQ ID NO: 40, wherein ‘n’ is 7 or more (e.g. 8, 10, 12, 14, 16, 18, 20, 25, 30, 35, 40, 50, 60, 70, 80, 90, 100, 150, 200, 250 or more). These IC6 proteins include variants of SEQ ID NO: 40. Preferred fragments of (b) comprise an epitope from SEQ ID NO: 40. Other preferred fragments lack one or more amino acids (e.g. 1, 2, 3, 4, 5, 6, 7, 8, 9, 10, 15, 20, 25 or more) from the C-terminus and/or one or more amino acids (e.g. 1, 2, 3, 4, 5, 6, 7, 8, 9, 10, 15, 20, 25 or more) from the N-terminus of SEQ ID NO: 40 while retaining at least one epitope of SEQ ID NO: 40. Other fragments omit one or more protein domains. IC7

[0234] IC7 is annotated in reference 10 as a hypothetical protein. For reference purposes, the amino acid sequence of full length IC7 is SEQ ID NO: 41 herein. In the R6 genome IC7 is spr0174 [84]. The use of IC7 for immunisation is reported in reference 10 (SEQ ID NO: 152 therein).

[0235] Preferred IC7 polypeptides for use with the invention comprise an amino acid sequence: (a) having 50% or more identity (e.g. 60%, 65%, 70%, 75%, 80%, 85%, 90%, 91%, 92%, 93%, 94%, 95%, 96%, 97%, 98%, 99%, 99.5% or more) to SEQ ID NO: 41; and/or (b) comprising a fragment of at least ‘n’ consecutive amino acids of SEQ ID NO: 41, wherein ‘n’ is 7 or more (e.g. 8, 10, 12, 14, 16, 18, 20, 25, 30, 35, 40, 50, 60, 70, 80, 90, 100, 150, 200, 250 or more). These IC7 proteins include variants of SEQ ID NO: 41. Preferred fragments of (b) comprise an epitope from SEQ ID NO: 41. Other preferred fragments lack one or more amino acids (e.g. 1, 2, 3, 4, 5, 6, 7, 8, 9, 10, 15, 20, 25 or more) from the C-terminus and/or one or more amino acids (e.g. 1, 2, 3, 4, 5, 6, 7, 8, 9, 10, 15, 20, 25 or more) from the N-terminus of SEQ ID NO: 41 while retaining at least one epitope of SEQ ID NO: 41. Other fragments omit one or more protein domains. Immunogenic fragments of IC7 are identified in table 1 of reference 10.

[0236] IC8

[0237] IC8 is a Dihydrofolate:folylpolyglutamate synthetase. For reference purposes, the amino acid sequence of full length IC8 is SEQ ID NO: 42 herein. In the R6 genome IC8 is spr0178 [84]. The use of IC8 for immunisation is reported in reference 10 (SEQ ID NO: 153 therein).

[0238] Preferred IC8 polypeptides for use with the invention comprise an amino acid sequence: (a) having 50% or more identity (e.g. 60%, 65%, 70%, 75%, 80%, 85%, 90%, 91%, 92%, 93%, 94%, 95%, 96%, 97%, 98%, 99%, 99.5% or more) to SEQ ID NO: 42; and/or (b) comprising a fragment of at least ‘n’ consecutive amino acids of SEQ ID NO: 42, wherein ‘n’ is 7 or more (e.g. 8, 10, 12, 14, 16, 18, 20, 25, 30, 35, 40, 50, 60, 70, 80, 90, 100, 150, 200, 250 or more). These IC8 proteins include variants of SEQ ID NO: 42. Preferred fragments of (b) comprise an epitope from SEQ ID NO: 42. Other preferred fragments lack one or more amino acids (e.g. 1, 2, 3, 4, 5, 6, 7, 8, 9, 10, 15, 20, 25 or more) from the C-terminus and/or one or more amino acids (e.g. 1, 2, 3, 4, 5, 6, 7, 8, 9, 10, 15, 20, 25 or more) from the N-terminus of SEQ ID NO: 42 while retaining at least one epitope of SEQ ID NO: 42. Other fragments omit one or more protein domains. Immunogenic fragments of IC8 are identified in table 1 of reference 10.

[0239] IC9

[0240] IC9 is a 50S ribosomal protein L2. For reference purposes, the amino acid sequence of full length IC9 is SEQ ID NO: 43 herein. In the R6 genome IC9 is spr0191 [84]. The use of IC9 for immunisation is reported in reference 10 (SEQ ID NO: 154 therein).

[0241] Preferred IC9 polypeptides for use with the invention comprise an amino acid sequence: (a) having 50% or more identity (e.g. 60%, 65%, 70%, 75%, 80%, 85%, 90%, 91%, 92%, 93%, 94%, 95%, 96%, 97%, 98%, 99%, 99.5% or more) to SEQ ID NO: 43; and/or (b) comprising a fragment of at least ‘n’ consecutive amino acids of SEQ ID NO: 43, wherein ‘n’ is 7 or more (e.g. 8, 10, 12, 14, 16, 18, 20, 25, 30, 35, 40, 50, 60, 70, 80, 90, 100, 150, 200, 250 or more). These IC9 proteins include variants of SEQ ID NO: 43. Preferred fragments of (b) comprise an epitope from SEQ ID NO: 43. Other preferred fragments lack one or more amino acids (e.g. 1, 2, 3, 4, 5, 6, 7, 8, 9, 10, 15, 20, 25 or more) from the C-terminus and/or one or more amino acids (e.g. 1, 2, 3, 4, 5, 6, 7, 8, 9, 10, 15, 20, 25 or more) from the N-terminus of SEQ ID NO: 43 while retaining at least one epitope of SEQ ID NO: 43. Other fragments omit one or more protein domains. Immunogenic fragments of IC9 are identified in table 1 of reference 10.

[0242] IC10

[0243] IC10 is a 30S Ribosomal protein S14. For reference purposes, the amino acid sequence of full length IC10 is SEQ ID NO: 44 herein. In the R6 genome IC10 is spr0202 [84]. The use of IC10 for immunisation is reported in reference 10 (SEQ ID NO: 155 therein).

[0244] Preferred IC10 polypeptides for use with the invention comprise an amino acid sequence: (a) having 50% or more identity (e.g. 60%, 65%, 70%, 75%, 80%, 85%, 90%, 91%, 92%, 93%, 94%, 95%, 96%, 97%, 98%, 99%, 99.5% or more) to SEQ ID NO: 44; and/or (b) comprising a fragment of at least ‘n’ consecutive amino acids of SEQ ID NO: 44, wherein ‘n’ is 7 or more (e.g. 8, 10, 12, 14, 16, 18, 20, 25, 30, 35, 40, 50, 60, 70, 80, 90, 100, 150, 200, 250 or more). These IC10 proteins include variants of SEQ ID NO: 44. Preferred fragments of (b) comprise an epitope from SEQ ID NO: 44. Other preferred fragments lack one or more amino acids (e.g. 1, 2, 3, 4, 5, 6, 7, 8, 9, 10, 15, 20, 25 or more) from the C-terminus and/or one or more amino acids (e.g. 1, 2, 3, 4, 5, 6, 7, 8, 9, 10, 15, 20, 25 or more) from the N-terminus of SEQ ID NO: 44 while retaining at least one epitope of SEQ ID NO: 44. Other fragments omit one or more protein domains. Immunogenic fragments of IC10 are identified in table 1 of reference 10.

[0245] IC11

[0246] IC11 is annotated in reference 10 as a hypothetical protein. For reference purposes, the amino acid sequence of full length IC11 is SEQ ID NO: 45 herein. In the R6 genome IC11 is spr0218 [84]. The use of IC11 for immunisation is reported in reference 10 (SEQ ID NO: 156 therein).

[0247] Preferred IC11 polypeptides for use with the invention comprise an amino acid sequence: (a) having 50% or more identity (e.g. 60%, 65%, 70%, 75%, 80%, 85%, 90%, 91%, 92%, 93%, 94%, 95%, 96%, 97%, 98%, 99%, 99.5% or more) to SEQ ID NO: 45; and/or (b) comprising a fragment of at least ‘n’ consecutive amino acids of SEQ ID NO: 45, wherein ‘n’ is 7 or more (e.g. 8, 10, 12, 14, 16, 18, 20, 25, 30, 35, 40, 50, 60, 70, 80, 90, 100, 150, 200, 250 or more). These IC11 proteins include variants of SEQ ID NO: 45. Preferred fragments of (b) comprise an epitope from SEQ ID NO: 45. Other preferred fragments lack one or more amino acids (e.g. 1, 2, 3, 4, 5, 6, 7, 8, 9, 10, 15, 20, 25 or more) from the C-terminus and/or one or more amino acids (e.g. 1, 2, 3, 4, 5, 6, 7, 8, 9, 10, 15, 20, 25 or more) from the N-terminus of SEQ ID NO: 45 while retaining at least one epitope of SEQ ID NO: 45. Other fragments omit one or more protein domains. Immunogenic fragments of IC11 are identified in table 1 of reference 10.

[0248] IC12

[0249] IC12 is a Formate acetyltransferase 3. For reference purposes, the amino acid sequence of full length IC12 is SEQ ID NO: 46 herein. In the R6 genome IC12 is spr0232 [84]. The use of IC12 for immunisation is reported in reference 10 (SEQ ID NO: 157 therein).

[0250] Preferred IC12 polypeptides for use with the invention comprise an amino acid sequence: (a) having 50% or more identity (e.g. 60%, 65%, 70%, 75%, 80%, 85%, 90%, 91%, 92%, 93%, 94%, 95%, 96%, 97%, 98%, 99%, 99.5% or more) to SEQ ID NO: 46; and/or (b) comprising a fragment of at least ‘n’ consecutive amino acids of SEQ ID NO: 46, wherein ‘n’ is 7 or more (e.g. 8, 10, 12, 14, 16, 18, 20, 25, 30, 35, 40, 50, 60, 70, 80, 90, 100, 150, 200, 250 or more). These IC12 proteins include variants of SEQ ID NO: 46. Preferred fragments of (b) comprise an epitope from SEQ ID NO: 46. Other preferred fragments lack one or more amino acids (e.g. 1, 2, 3, 4, 5, 6, 7, 8, 9, 10, 15, 20, 25 or more) from the C-terminus and/or one or more amino acids (e.g. 1, 2, 3, 4, 5, 6, 7, 8, 9, 10, 15, 20, 25 or more) from the N-terminus of SEQ ID NO: 46 while retaining at least one epitope of SEQ ID NO: 46. Other fragments omit one or more protein domains. Immunogenic fragments of IC12 are identified in table 1 of reference 10.

[0251] IC13

[0252] IC13 is a 30S ribosomal protein S9. For reference purposes, the amino acid sequence of full length IC13 is SEQ ID NO: 47 herein. In the R6 genome IC13 is spr0272 [84]. The use of IC13 for immunisation is reported in reference 10 (SEQ ID NO: 158 therein).

[0253] Preferred IC13 polypeptides for use with the invention comprise an amino acid sequence: (a) having 50% or more identity (e.g. 60%, 65%, 70%, 75%, 80%, 85%, 90%, 91%, 92%, 93%, 94%, 95%, 96%, 97%, 98%, 99%, 99.5% or more) to SEQ ID NO: 47; and/or (b) comprising a fragment of at least ‘n’ consecutive amino acids of SEQ ID NO: 47, wherein ‘n’ is 7 or more (e.g. 8, 10, 12, 14, 16, 18, 20, 25, 30, 35, 40, 50, 60, 70, 80, 90, 100, 150, 200, 250 or more). These IC13 proteins include variants of SEQ ID NO: 47. Preferred fragments of (b) comprise an epitope from SEQ ID NO: 47. Other preferred fragments lack one or more amino acids (e.g. 1, 2, 3, 4, 5, 6, 7, 8, 9, 10, 15, 20, 25 or more) from the C-terminus and/or one or more amino acids (e.g. 1, 2, 3, 4, 5, 6, 7, 8, 9, 10, 15, 20, 25 or more) from the N-terminus of SEQ ID NO: 47 while retaining at least one epitope of SEQ ID NO: 47. Other fragments omit one or more protein domains. Immunogenic fragments of IC13 are identified in table 1 of reference 10.

[0254] IC14

[0255] IC14 is a Transcription regulator. For reference purposes, the amino acid sequence of full length IC14 is SEQ ID NO: 48 herein. In the R6 genome IC14 is spr0298 [84]. The use of IC14 for immunisation is reported in reference 10 (SEQ ID NO: 159 therein).

[0256] Preferred IC14 polypeptides for use with the invention comprise an amino acid sequence: (a) having 50% or more identity (e.g. 60%, 65%, 70%, 75%, 80%, 85%, 90%, 91%, 92%, 93%, 94%, 95%, 96%, 97%, 98%, 99%, 99.5% or more) to SEQ ID NO: 48; and/or (b) comprising a fragment of at least ‘n’ consecutive amino acids of SEQ ID NO: 48, wherein ‘n’ is 7 or more (e.g. 8, 10, 12, 14, 16, 18, 20, 25, 30, 35, 40, 50, 60, 70, 80, 90, 100, 150, 200, 250 or more). These IC14 proteins include variants of SEQ ID NO: 48. Preferred fragments of (b) comprise an epitope from SEQ ID NO: 48. Other preferred fragments lack one or more amino acids (e.g. 1, 2, 3, 4, 5, 6, 7, 8, 9, 10, 15, 20, 25 or more) from the C-terminus and/or one or more amino acids (e.g. 1, 2, 3, 4, 5, 6, 7, 8, 9, 10, 15, 20, 25 or more) from the N-terminus of SEQ ID NO: 48 while retaining at least one epitope of SEQ ID NO: 48. Other fragments omit one or more protein domains. Immunogenic fragments of IC14 are identified in table 1 of reference 10.

[0257] IC15

[0258] IC15 is annotated in reference 10 as a cell wall surface anchor family protein. For reference purposes, the amino acid sequence of full length IC15 is SEQ ID NO: 49 herein. In the R6 genome IC15 is spr0328 [84]. The use of IC15 for immunisation is reported in reference 10 (SEQ ID NO: 160 therein), and it is shown to be protective in reference 78 (antigen SP0368).

[0259] Preferred IC15 polypeptides for use with the invention comprise an amino acid sequence: (a) having 50% or more identity (e.g. 60%, 65%, 70%, 75%, 80%, 85%, 90%, 91%, 92%, 93%, 94%, 95%, 96%, 97%, 98%, 99%, 99.5% or more) to SEQ ID NO: 49; and/or (b) comprising a fragment of at least ‘n’ consecutive amino acids of SEQ ID NO: 49, wherein ‘n’ is 7 or more (e.g. 8, 10, 12, 14, 16, 18, 20, 25, 30, 35, 40, 50, 60, 70, 80, 90, 100, 150, 200, 250 or more). These IC15 proteins include variants of SEQ ID NO: 49. Preferred fragments of (b) comprise an epitope from SEQ ID NO: 49. Other preferred fragments lack one or more amino acids (e.g. 1, 2, 3, 4, 5, 6, 7, 8, 9, 10, 15, 20, 25 or more) from the C-terminus and/or one or more amino acids (e.g. 1, 2, 3, 4, 5, 6, 7, 8, 9, 10, 15, 20, 25 or more) from the N-terminus of SEQ ID NO: 49 while retaining at least one epitope of SEQ ID NO: 49. Other fragments omit one or more protein domains. Immunogenic fragments of IC15 are identified in table 1 of reference 10.

[0260] IC16

[0261] IC16 is a Penicillin-binding protein 1A. For reference purposes, the amino acid sequence of full length IC16 is SEQ ID NO: 50 herein. In the R6 genome IC16 is spr0329 [84]. The use of IC16 for immunisation is reported in reference 10 (SEQ ID NO: 161 therein).

[0262] Preferred IC16 polypeptides for use with the invention comprise an amino acid sequence: (a) having 50% or more identity (e.g. 60%, 65%, 70%, 75%, 80%, 85%, 90%, 91%, 92%, 93%, 94%, 95%, 96%, 97%, 98%, 99%, 99.5% or more) to SEQ ID NO: 50; and/or (b) comprising a fragment of at least ‘n’ consecutive amino acids of SEQ ID NO: 50, wherein ‘n’ is 7 or more (e.g. 8, 10, 12, 14, 16, 18, 20, 25, 30, 35, 40, 50, 60, 70, 80, 90, 100, 150, 200, 250 or more). These IC16 proteins include variants of SEQ ID NO: 50. Preferred fragments of (b) comprise an epitope from SEQ ID NO: 50. Other preferred fragments lack one or more amino acids (e.g. 1, 2, 3, 4, 5, 6, 7, 8, 9, 10, 15, 20, 25 or more) from the C-terminus and/or one or more amino acids (e.g. 1, 2, 3, 4, 5, 6, 7, 8, 9, 10, 15, 20, 25 or more) from the N-terminus of SEQ ID NO: 50 while retaining at least one epitope of SEQ ID NO: 50. Other fragments omit one or more protein domains. Immunogenic fragments of IC16 are identified in table 1 of reference 10.

[0263] IC17

[0264] IC17 is annotated in reference 10 as a hypothetical protein. For reference purposes, the amino acid sequence of full length IC17 is SEQ ID NO: 51 herein. In the R6 genome IC17 is spr0334 [84]. The use of IC17 for immunisation is reported in reference 10 (SEQ ID NO: 162 therein).

[0265] Preferred IC17 polypeptides for use with the invention comprise an amino acid sequence: (a) having 50% or more identity (e.g. 60%, 65%, 70%, 75%, 80%, 85%, 90%, 91%, 92%, 93%, 94%, 95%, 96%, 97%, 98%, 99%, 99.5% or more) to SEQ ID NO: 51; and/or (b) comprising a fragment of at least ‘n’ consecutive amino acids of SEQ ID NO: 51, wherein ‘n’ is 7 or more (e.g. 8, 10, 12, 14, 16, 18, 20, 25, 30, 35, 40, 50, 60, 70, 80, 90, 100, 150, 200, 250 or more). These IC17 proteins include variants of SEQ ID NO: 51. Preferred fragments of (b) comprise an epitope from SEQ ID NO: 51. Other preferred fragments lack one or more amino acids (e.g. 1, 2, 3, 4, 5, 6, 7, 8, 9, 10, 15, 20, 25 or more) from the C-terminus and/or one or more amino acids (e.g. 1, 2, 3, 4, 5, 6, 7, 8, 9, 10, 15, 20, 25 or more) from the N-terminus of SEQ ID NO: 51 while retaining at least one epitope of SEQ ID NO: 51. Other fragments omit one or more protein domains. Immunogenic fragments of IC17 are identified in table 1 of reference 10.

[0266] IC18

[0267] IC18 is annotated in reference 10 as choline-binding protein F. For reference purposes, the amino acid sequence of full length IC18 is SEQ ID NO: 52 herein. In the R6 genome IC18 is spr0337 [84]. The use of IC18 for immunisation is reported in reference 10 (SEQ ID NO: 163 therein).

[0268] Preferred IC18 polypeptides for use with the invention comprise an amino acid sequence: (a) having 50% or more identity (e.g. 60%, 65%, 70%, 75%, 80%, 85%, 90%, 91%, 92%, 93%, 94%, 95%, 96%, 97%, 98%, 99%, 99.5% or more) to SEQ ID NO: 52; and/or (b) comprising a fragment of at least ‘n’ consecutive amino acids of SEQ ID NO: 52, wherein ‘n’ is 7 or more (e.g. 8, 10, 12, 14, 16, 18, 20, 25, 30, 35, 40, 50, 60, 70, 80, 90, 100, 150, 200, 250 or more). These IC18 proteins include variants of SEQ ID NO: 52. Preferred fragments of (b) comprise an epitope from SEQ ID NO: 52. Other preferred fragments lack one or more amino acids (e.g. 1, 2, 3, 4, 5, 6, 7, 8, 9, 10, 15, 20, 25 or more) from the C-terminus and/or one or more amino acids (e.g. 1, 2, 3, 4, 5, 6, 7, 8, 9, 10, 15, 20, 25 or more) from the N-terminus of SEQ ID NO: 52 while retaining at least one epitope of SEQ ID NO: 52. Other fragments omit one or more protein domains. Immunogenic fragments of IC18 are identified in table 1 of reference 10.

[0269] IC19

[0270] IC19 is annotated in reference 10 as a choline-binding protein J (cbpJ). For reference purposes, the amino acid sequence of full length IC19 is SEQ ID NO: 53 herein. The use of IC19 for immunisation is reported in reference 10 (SEQ ID NO: 164 therein).

[0271] Preferred IC19 polypeptides for use with the invention comprise an amino acid sequence: (a) having 50% or more identity (e.g. 60%, 65%, 70%, 75%, 80%, 85%, 90%, 91%, 92%, 93%, 94%, 95%, 96%, 97%, 98%, 99%, 99.5% or more) to SEQ ID NO: 53; and/or (b) comprising a fragment of at least ‘n’ consecutive amino acids of SEQ ID NO: 53, wherein ‘n’ is 7 or more (e.g. 8, 10, 12, 14, 16, 18, 20, 25, 30, 35, 40, 50, 60, 70, 80, 90, 100, 150, 200, 250 or more). These IC19 proteins include variants of SEQ ID NO: 53. Preferred fragments of (b) comprise an epitope from SEQ ID NO: 53. Other preferred fragments lack one or more amino acids (e.g. 1, 2, 3, 4, 5, 6, 7, 8, 9, 10, 15, 20, 25 or more) from the C-terminus and/or one or more amino acids (e.g. 1, 2, 3, 4, 5, 6, 7, 8, 9, 10, 15, 20, 25 or more) from the N-terminus of SEQ ID NO: 53 while retaining at least one epitope of SEQ ID NO: 53. Other fragments omit one or more protein domains. Immunogenic fragments of IC19 are identified in table 1 of reference 10.

[0272] IC20

[0273] IC20 is a choline binding protein G. For reference purposes, the amino acid sequence of full length IC20 is SEQ ID NO: 54 herein. In the R6 genome IC20 is spr0349 [84]. The use of IC20 for immunisation is reported in reference 10 (SEQ ID NO: 165 therein).

[0274] Preferred IC20 polypeptides for use with the invention comprise an amino acid sequence: (a) having 50% or more identity (e.g. 60%, 65%, 70%, 75%, 80%, 85%, 90%, 91%, 92%, 93%, 94%, 95%, 96%, 97%, 98%, 99%, 99.5% or more) to SEQ ID NO: 54; and/or (b) comprising a fragment of at least ‘n’ consecutive amino acids of SEQ ID NO: 54, wherein ‘n’ is 7 or more (e.g. 8, 10, 12, 14, 16, 18, 20, 25, 30, 35, 40, 50, 60, 70, 80, 90, 100, 150, 200, 250 or more). These IC20 proteins include variants of SEQ ID NO: 54. Preferred fragments of (b) comprise an epitope from SEQ ID NO: 54. Other preferred fragments lack one or more amino acids (e.g. 1, 2, 3, 4, 5, 6, 7, 8, 9, 10, 15, 20, 25 or more) from the C-terminus and/or one or more amino acids (e.g. 1, 2, 3, 4, 5, 6, 7, 8, 9, 10, 15, 20, 25 or more) from the N-terminus of SEQ ID NO: 54 while retaining at least one epitope of SEQ ID NO: 54. Other fragments omit one or more protein domains. Immunogenic fragments of IC20 are identified in table 1 of reference 10.

[0275] IC21

[0276] IC21 is annotated in reference 10 as a hypothetical protein. For reference purposes, the amino acid sequence of full length IC21 is SEQ ID NO: 55 herein. In the R6 genome IC21 is spr0410 [84]. The use of IC21 for immunisation is reported in reference 10 (SEQ ID NO: 166 therein).

[0277] Preferred IC21 polypeptides for use with the invention comprise an amino acid sequence: (a) having 50% or more identity (e.g. 60%, 65%, 70%, 75%, 80%, 85%, 90%, 91%, 92%, 93%, 94%, 95%, 96%, 97%, 98%, 99%, 99.5% or more) to SEQ ID NO: 55; and/or (b) comprising a fragment of at least ‘n’ consecutive amino acids of SEQ ID NO: 55, wherein ‘n’ is 7 or more (e.g. 8, 10, 12, 14, 16, 18, 20, 25, 30, 35, 40, 50, 60, 70, 80, 90, 100, 150, 200, 250 or more). These IC21 proteins include variants of SEQ ID NO: 55. Preferred fragments of (b) comprise an epitope from SEQ ID NO: 55. Other preferred fragments lack one or more amino acids (e.g. 1, 2, 3, 4, 5, 6, 7, 8, 9, 10, 15, 20, 25 or more) from the C-terminus and/or one or more amino acids (e.g. 1, 2, 3, 4, 5, 6, 7, 8, 9, 10, 15, 20, 25 or more) from the N-terminus of SEQ ID NO: 55 while retaining at least one epitope of SEQ ID NO: 55. Other fragments omit one or more protein domains. Immunogenic fragments of IC21 are identified in table 1 of reference 10.

[0278] IC22

[0279] IC22 is annotated in reference 10 as cell wall surface anchor family protein. For reference purposes, the amino acid sequence of full length IC22 is SEQ ID NO: 56 herein. In the R6 genome IC22 is spr0051 [84]. The use of IC22 for immunisation is reported in reference 10 (SEQ ID NO: 167 therein).

[0280] Preferred IC22 polypeptides for use with the invention comprise an amino acid sequence: (a) having 50% or more identity (e.g. 60%, 65%, 70%, 75%, 80%, 85%, 90%, 91%, 92%, 93%, 94%, 95%, 96%, 97%, 98%, 99%, 99.5% or more) to SEQ ID NO: 56; and/or (b) comprising a fragment of at least ‘n’ consecutive amino acids of SEQ ID NO: 56, wherein ‘n’ is 7 or more (e.g. 8, 10, 12, 14, 16, 18, 20, 25, 30, 35, 40, 50, 60, 70, 80, 90, 100, 150, 200, 250 or more). These IC22 proteins include variants of SEQ ID NO: 56. Preferred fragments of (b) comprise an epitope from SEQ ID NO: 56. Other preferred fragments lack one or more amino acids (e.g. 1, 2, 3, 4, 5, 6, 7, 8, 9, 10, 15, 20, 25 or more) from the C-terminus and/or one or more amino acids (e.g. 1, 2, 3, 4, 5, 6, 7, 8, 9, 10, 15, 20, 25 or more) from the N-terminus of SEQ ID NO: 56 while retaining at least one epitope of SEQ ID NO: 56. Other fragments omit one or more protein domains. Immunogenic fragments of IC22 are identified in table 1 of reference 10.

[0281] IC23

[0282] IC23 is a Sortase (cf. spr1098). For reference purposes, the amino acid sequence of full length IC23 is SEQ ID NO: 57 herein. The use of IC23 for immunisation is reported in reference 10 (SEQ ID NO: 168 therein).

[0283] Preferred IC23 polypeptides for use with the invention comprise an amino acid sequence: (a) having 50% or more identity (e.g. 60%, 65%, 70%, 75%, 80%, 85%, 90%, 91%, 92%, 93%, 94%, 95%, 96%, 97%, 98%, 99%, 99.5% or more) to SEQ ID NO: 57; and/or (b) comprising a fragment of at least ‘n’ consecutive amino acids of SEQ ID NO: 57, wherein ‘n’ is 7 or more (e.g. 8, 10, 12, 14, 16, 18, 20, 25, 30, 35, 40, 50, 60, 70, 80, 90, 100, 150, 200, 250 or more). These IC23 proteins include variants of SEQ ID NO: 57. Preferred fragments of (b) comprise an epitope from SEQ ID NO: 57. Other preferred fragments lack one or more amino acids (e.g. 1, 2, 3, 4, 5, 6, 7, 8, 9, 10, 15, 20, 25 or more) from the C-terminus and/or one or more amino acids (e.g. 1, 2, 3, 4, 5, 6, 7, 8, 9, 10, 15, 20, 25 or more) from the N-terminus of SEQ ID NO: 57 while retaining at least one epitope of SEQ ID NO: 57. Other fragments omit one or more protein domains. Immunogenic fragments of IC23 are identified in table 1 of reference 10.

[0284] IC24

[0285] IC24 is a Sortase (cf. spr1098). For reference purposes, the amino acid sequence of full length IC24 is SEQ ID NO: 58 herein. The use of IC24 for immunisation is reported in reference 10 (SEQ ID NO: 169 therein).

[0286] Preferred IC24 polypeptides for use with the invention comprise an amino acid sequence: (a) having 50% or more identity (e.g. 60%, 65%, 70%, 75%, 80%, 85%, 90%, 91%, 92%, 93%, 94%, 95%, 96%, 97%, 98%, 99%, 99.5% or more) to SEQ ID NO: 58; and/or (b) comprising a fragment of at least ‘n’ consecutive amino acids of SEQ ID NO: 58, wherein ‘n’ is 7 or more (e.g. 8, 10, 12, 14, 16, 18, 20, 25, 30, 35, 40, 50, 60, 70, 80, 90, 100, 150, 200, 250 or more). These IC24 proteins include variants of SEQ ID NO: 58. Preferred fragments of (b) comprise an epitope from SEQ ID NO: 58. Other preferred fragments lack one or more amino acids (e.g. 1, 2, 3, 4, 5, 6, 7, 8, 9, 10, 15, 20, 25 or more) from the C-terminus and/or one or more amino acids (e.g. 1, 2, 3, 4, 5, 6, 7, 8, 9, 10, 15, 20, 25 or more) from the N-terminus of SEQ ID NO: 58 while retaining at least one epitope of SEQ ID NO: 58. Other fragments omit one or more protein domains. Immunogenic fragments of IC24 are identified in table 1 of reference 10.

[0287] IC25

[0288] IC25 is annotated in reference 10 as a putative endo-β-N-acetylglucosaminidase. For reference purposes, the amino acid sequence of full length IC25 is SEQ ID NO: 59 herein. In the R6 genome IC25 is spr0440 [84]. The use of IC25 for immunisation is reported in reference 10 (SEQ ID NO: 170 therein).

[0289] Preferred IC25 polypeptides for use with the invention comprise an amino acid sequence: (a) having 50% or more identity (e.g. 60%, 65%, 70%, 75%, 80%, 85%, 90%, 91%, 92%, 93%, 94%, 95%, 96%, 97%, 98%, 99%, 99.5% or more) to SEQ ID NO: 59; and/or (b) comprising a fragment of at least ‘n’ consecutive amino acids of SEQ ID NO: 59, wherein ‘n’ is 7 or more (e.g. 8, 10, 12, 14, 16, 18, 20, 25, 30, 35, 40, 50, 60, 70, 80, 90, 100, 150, 200, 250 or more). These IC25 proteins include variants of SEQ ID NO: 59. Preferred fragments of (b) comprise an epitope from SEQ ID NO: 59. Other preferred fragments lack one or more amino acids (e.g. 1, 2, 3, 4, 5, 6, 7, 8, 9, 10, 15, 20, 25 or more) from the C-terminus and/or one or more amino acids (e.g. 1, 2, 3, 4, 5, 6, 7, 8, 9, 10, 15, 20, 25 or more) from the N-terminus of SEQ ID NO: 59 while retaining at least one epitope of SEQ ID NO: 59. Other fragments omit one or more protein domains. Immunogenic fragments of IC25 are identified in table 1 of reference 10.

[0290] IC26

[0291] IC26 is a EcoE type I restriction modification enzyme. For reference purposes, the amino acid sequence of full length IC26 is SEQ ID NO: 60 herein. In the R6 genome IC26 is spr0449 [84]. The use of IC26 for immunisation is reported in reference 10 (SEQ ID NO: 171 therein).

[0292] Preferred IC26 polypeptides for use with the invention comprise an amino acid sequence: (a) having 50% or more identity (e.g. 60%, 65%, 70%, 75%, 80%, 85%, 90%, 91%, 92%, 93%, 94%, 95%, 96%, 97%, 98%, 99%, 99.5% or more) to SEQ ID NO: 60; and/or (b) comprising a fragment of at least ‘n’ consecutive amino acids of SEQ ID NO: 60, wherein ‘n’ is 7 or more (e.g. 8, 10, 12, 14, 16, 18, 20, 25, 30, 35, 40, 50, 60, 70, 80, 90, 100, 150, 200, 250 or more). These IC26 proteins include variants of SEQ ID NO: 60. Preferred fragments of (b) comprise an epitope from SEQ ID NO: 60. Other preferred fragments lack one or more amino acids (e.g. 1, 2, 3, 4, 5, 6, 7, 8, 9, 10, 15, 20, 25 or more) from the C-terminus and/or one or more amino acids (e.g. 1, 2, 3, 4, 5, 6, 7, 8, 9, 10, 15, 20, 25 or more) from the N-terminus of SEQ ID NO: 60 while retaining at least one epitope of SEQ ID NO: 60. Other fragments omit one or more protein domains. Immunogenic fragments of IC26 are identified in table 1 of reference 10.

[0293] IC27

[0294] IC27 is annotated in reference 10 as dnaJ protein. For reference purposes, the amino acid sequence of full length IC27 is SEQ ID NO: 61 herein. In the R6 genome IC27 is spr0456 [84]. The use of IC27 for immunisation is reported in reference 10 (SEQ ID NO: 172 therein).

[0295] Preferred IC27 polypeptides for use with the invention comprise an amino acid sequence: (a) having 50% or more identity (e.g. 60%, 65%, 70%, 75%, 80%, 85%, 90%, 91%, 92%, 93%, 94%, 95%, 96%, 97%, 98%, 99%, 99.5% or more) to SEQ ID NO: 61; and/or (b) comprising a fragment of at least ‘n’ consecutive amino acids of SEQ ID NO: 61, wherein ‘n’ is 7 or more (e.g. 8, 10, 12, 14, 16, 18, 20, 25, 30, 35, 40, 50, 60, 70, 80, 90, 100, 150, 200, 250 or more). These IC27 proteins include variants of SEQ ID NO: 61. Preferred fragments of (b) comprise an epitope from SEQ ID NO: 61. Other preferred fragments lack one or more amino acids (e.g. 1, 2, 3, 4, 5, 6, 7, 8, 9, 10, 15, 20, 25 or more) from the C-terminus and/or one or more amino acids (e.g. 1, 2, 3, 4, 5, 6, 7, 8, 9, 10, 15, 20, 25 or more) from the N-terminus of SEQ ID NO: 61 while retaining at least one epitope of SEQ ID NO: 61. Other fragments omit one or more protein domains. Immunogenic fragments of IC27 are identified in table 1 of reference 10.

[0296] IC28

[0297] IC28 is annotated in reference 10 as a BlpC ABC transporter (blpB). For reference purposes, the amino acid sequence of full length IC28 is SEQ ID NO: 62 herein. In the R6 genome IC28 is spr0466 [84]. The use of IC28 for immunisation is reported in reference 10 (SEQ ID NO: 173 therein).

[0298] Preferred IC28 polypeptides for use with the invention comprise an amino acid sequence: (a) having 50% or more identity (e.g. 60%, 65%, 70%, 75%, 80%, 85%, 90%, 91%, 92%, 93%, 94%, 95%, 96%, 97%, 98%, 99%, 99.5% or more) to SEQ ID NO: 62; and/or (b) comprising a fragment of at least ‘n’ consecutive amino acids of SEQ ID NO: 62, wherein ‘n’ is 7 or more (e.g. 8, 10, 12, 14, 16, 18, 20, 25, 30, 35, 40, 50, 60, 70, 80, 90, 100, 150, 200, 250 or more). These IC28 proteins include variants of SEQ ID NO: 62. Preferred fragments of (b) comprise an epitope from SEQ ID NO: 62. Other preferred fragments lack one or more amino acids (e.g. 1, 2, 3, 4, 5, 6, 7, 8, 9, 10, 15, 20, 25 or more) from the C-terminus and/or one or more amino acids (e.g. 1, 2, 3, 4, 5, 6, 7, 8, 9, 10, 15, 20, 25 or more) from the N-terminus of SEQ ID NO: 62 while retaining at least one epitope of SEQ ID NO: 62. Other fragments omit one or more protein domains. Immunogenic fragments of IC28 are identified in table 1 of reference 10.

[0299] IC29

[0300] IC29 is annotated in reference 10 as a hypothetical protein. For reference purposes, the amino acid sequence of full length IC29 is SEQ ID NO: 63 herein. In the R6 genome IC29 is spr0488 [84]. The use of IC29 for immunisation is reported in reference 10 (SEQ ID NO: 174 therein).

[0301] Preferred IC29 polypeptides for use with the invention comprise an amino acid sequence: (a) having 50% or more identity (e.g. 60%, 65%, 70%, 75%, 80%, 85%, 90%, 91%, 92%, 93%, 94%, 95%, 96%, 97%, 98%, 99%, 99.5% or more) to SEQ ID NO: 63; and/or (b) comprising a fragment of at least ‘n’ consecutive amino acids of SEQ ID NO: 63, wherein ‘n’ is 7 or more (e.g. 8, 10, 12, 14, 16, 18, 20, 25, 30, 35, 40, 50, 60, 70, 80, 90, 100, 150, 200, 250 or more). These IC29 proteins include variants of SEQ ID NO: 63. Preferred fragments of (b) comprise an epitope from SEQ ID NO: 63. Other preferred fragments lack one or more amino acids (e.g. 1, 2, 3, 4, 5, 6, 7, 8, 9, 10, 15, 20, 25 or more) from the C-terminus and/or one or more amino acids (e.g. 1, 2, 3, 4, 5, 6, 7, 8, 9, 10, 15, 20, 25 or more) from the N-terminus of SEQ ID NO: 63 while retaining at least one epitope of SEQ ID NO: 63. Other fragments omit one or more protein domains. Immunogenic fragments of IC29 are identified in table 1 of reference 10.

[0302] IC30

[0303] IC30 is a ABC transporter substrate-binding protein. For reference purposes, the amino acid sequence of full length IC30 is SEQ ID NO: 64 herein. In the R6 genome IC30 is spr0534 [84]. The use of IC30 for immunisation is reported in reference 10 (SEQ ID NO: 175 therein).

[0304] Preferred IC30 polypeptides for use with the invention comprise an amino acid sequence: (a) having 50% or more identity (e.g. 60%, 65%, 70%, 75%, 80%, 85%, 90%, 91%, 92%, 93%, 94%, 95%, 96%, 97%, 98%, 99%, 99.5% or more) to SEQ ID NO: 64; and/or (b) comprising a fragment of at least ‘n’ consecutive amino acids of SEQ ID NO: 64, wherein is 7 or more (e.g. 8, 10, 12, 14, 16, 18, 20, 25, 30, 35, 40, 50, 60, 70, 80, 90, 100, 150, 200, 250 or more). These IC30 proteins include variants of SEQ ID NO: 64. Preferred fragments of (b) comprise an epitope from SEQ ID NO: 64. Other preferred fragments lack one or more amino acids (e.g. 1, 2, 3, 4, 5, 6, 7, 8, 9, 10, 15, 20, 25 or more) from the C-terminus and/or one or more amino acids (e.g. 1, 2, 3, 4, 5, 6, 7, 8, 9, 10, 15, 20, 25 or more) from the N-terminus of SEQ ID NO: 64 while retaining at least one epitope of SEQ ID NO: 64. Other fragments omit one or more protein domains. Immunogenic fragments of IC30 are identified in table 1 of reference 10.

[0305] IC31

[0306] IC31 is annotated in reference 10 as a metallo-β-lactamase superfamily protein. For reference purposes, the amino acid sequence of full length IC31 is SEQ ID NO: 65 herein. In the R6 genome IC31 is spr0538 [84]. The use of IC31 for immunisation is reported in reference 10 (SEQ ID NO: 176 therein).

[0307] Preferred IC31 polypeptides for use with the invention comprise an amino acid sequence: (a) having 50% or more identity (e.g. 60%, 65%, 70%, 75%, 80%, 85%, 90%, 91%, 92%, 93%, 94%, 95%, 96%, 97%, 98%, 99%, 99.5% or more) to SEQ ID NO: 65; and/or (b) comprising a fragment of at least ‘n’ consecutive amino acids of SEQ ID NO: 65, wherein ‘n’ is 7 or more (e.g. 8, 10, 12, 14, 16, 18, 20, 25, 30, 35, 40, 50, 60, 70, 80, 90, 100, 150, 200, 250 or more). These IC31 proteins include variants of SEQ ID NO: 65. Preferred fragments of (b) comprise an epitope from SEQ ID NO: 65. Other preferred fragments lack one or more amino acids (e.g. 1, 2, 3, 4, 5, 6, 7, 8, 9, 10, 15, 20, 25 or more) from the C-terminus and/or one or more amino acids (e.g. 1, 2, 3, 4, 5, 6, 7, 8, 9, 10, 15, 20, 25 or more) from the N-terminus of SEQ ID NO: 65 while retaining at least one epitope of SEQ ID NO: 65. Other fragments omit one or more protein domains. Immunogenic fragments of IC31 are identified in table 1 of reference 10.

[0308] IC32

[0309] IC32 is a variant form of spr0565, as mentioned above (SEQ ID NO: 66 herein). Useful IC32 polypeptides may comprise an amino acid sequence: (a) having 50% or more identity (e.g. 60%, 65%, 70%, 75%, 80%, 85%, 90%, 91%, 92%, 93%, 94%, 95%, 96%, 97%, 98%, 99%, 99.5% or more) to SEQ ID NO: 66; and/or (b) comprising a fragment of at least ‘n’ consecutive amino acids of SEQ ID NO: 66, wherein ‘n’ is 7 or more (e.g. 8, 10, 12, 14, 16, 18, 20, 25, 30, 35, 40, 50, 60, 70, 80, 90, 100, 150, 200, 250 or more). These IC32 polypeptides include variants of SEQ ID NO: 66. Preferred fragments of (b) comprise an epitope from SEQ ID NO: 66. Other preferred fragments lack one or more amino acids (e.g. 1, 2, 3, 4, 5, 6, 7, 8, 9, 10, 15, 20, 25 or more) from the C-terminus and/or one or more amino acids (e.g. 1, 2, 3, 4, 5, 6, 7, 8, 9, 10, 15, 20, 25 or more) from the N-terminus of SEQ ID NO: 66 while retaining at least one epitope of SEQ ID NO: 66. Other fragments omit one or more protein domains. Immunogenic fragments of SEQ ID NO: 66 are identified in table 1 of reference 10.

[0310] IC33

[0311] IC33 is annotated in reference 10 as a putative pneumococcal surface protein. For reference purposes, the amino acid sequence of full length IC33 is SEQ ID NO: 67 herein. In the R6 genome IC33 is spr0583 [84]. The use of IC33 for immunisation is reported in reference 10 (SEQ ID NO: 180 therein) and it is shown to be protective in reference 78 (antigen SP0667).

[0312] Preferred IC33 polypeptides for use with the invention comprise an amino acid sequence: (a) having 50% or more identity (e.g. 60%, 65%, 70%, 75%, 80%, 85%, 90%, 91%, 92%, 93%, 94%, 95%, 96%, 97%, 98%, 99%, 99.5% or more) to SEQ ID NO: 67; and/or (b) comprising a fragment of at least ‘n’ consecutive amino acids of SEQ ID NO: 67, wherein ‘n’ is 7 or more (e.g. 8, 10, 12, 14, 16, 18, 20, 25, 30, 35, 40, 50, 60, 70, 80, 90, 100, 150, 200, 250 or more). These IC33 proteins include variants of SEQ ID NO: 67. Preferred fragments of (b) comprise an epitope from SEQ ID NO: 67. Other preferred fragments lack one or more amino acids (e.g. 1, 2, 3, 4, 5, 6, 7, 8, 9, 10, 15, 20, 25 or more) from the C-terminus and/or one or more amino acids (e.g. 1, 2, 3, 4, 5, 6, 7, 8, 9, 10, 15, 20, 25 or more) from the N-terminus of SEQ ID NO: 67 while retaining at least one epitope of SEQ ID NO: 67. Other fragments omit one or more protein domains. Immunogenic fragments of IC33 are identified in table 1 of reference 10.

[0313] IC34

[0314] IC34 is a UDP-N-acetylmuramoyl-L-alanyl-D-glutamate synthetase. For reference purposes, the amino acid sequence of full length IC34 is SEQ ID NO: 68 herein. In the R6 genome IC34 is spr0603 [84]. The use of IC34 for immunisation is reported in reference 10 (SEQ ID NO: 181 therein).

[0315] Preferred IC34 polypeptides for use with the invention comprise an amino acid sequence: (a) having 50% or more identity (e.g. 60%, 65%, 70%, 75%, 80%, 85%, 90%, 91%, 92%, 93%, 94%, 95%, 96%, 97%, 98%, 99%, 99.5% or more) to SEQ ID NO: 68; and/or (b) comprising a fragment of at least ‘n’ consecutive amino acids of SEQ ID NO: 68, wherein ‘n’ is 7 or more (e.g. 8, 10, 12, 14, 16, 18, 20, 25, 30, 35, 40, 50, 60, 70, 80, 90, 100, 150, 200, 250 or more). These IC34 proteins include variants of SEQ ID NO: 68. Preferred fragments of (b) comprise an epitope from SEQ ID NO: 68. Other preferred fragments lack one or more amino acids (e.g. 1, 2, 3, 4, 5, 6, 7, 8, 9, 10, 15, 20, 25 or more) from the C-terminus and/or one or more amino acids (e.g. 1, 2, 3, 4, 5, 6, 7, 8, 9, 10, 15, 20, 25 or more) from the N-terminus of SEQ ID NO: 68 while retaining at least one epitope of SEQ ID NO: 68. Other fragments omit one or more protein domains. Immunogenic fragments of IC34 are identified in table 1 of reference 10.

[0316] IC35

[0317] IC35 is a ABC transporter substrate-binding protein. For reference purposes, the amino acid sequence of full length IC35 is SEQ ID NO: 69 herein. In the R6 genome IC35 is spr0659 [84]. The use of IC35 for immunisation is reported in reference 10 (SEQ ID NO: 182 therein).

[0318] Preferred IC35 polypeptides for use with the invention comprise an amino acid sequence: (a) having 50% or more identity (e.g. 60%, 65%, 70%, 75%, 80%, 85%, 90%, 91%, 92%, 93%, 94%, 95%, 96%, 97%, 98%, 99%, 99.5% or more) to SEQ ID NO: 69; and/or (b) comprising a fragment of at least ‘n’ consecutive amino acids of SEQ ID NO: 69, wherein ‘n’ is 7 or more (e.g. 8, 10, 12, 14, 16, 18, 20, 25, 30, 35, 40, 50, 60, 70, 80, 90, 100, 150, 200, 250 or more). These IC35 proteins include variants of SEQ ID NO: 69. Preferred fragments of (b) comprise an epitope from SEQ ID NO: 69. Other preferred fragments lack one or more amino acids (e.g. 1, 2, 3, 4, 5, 6, 7, 8, 9, 10, 15, 20, 25 or more) from the C-terminus and/or one or more amino acids (e.g. 1, 2, 3, 4, 5, 6, 7, 8, 9, 10, 15, 20, 25 or more) from the N-terminus of SEQ ID NO: 69 while retaining at least one epitope of SEQ ID NO: 69. Other fragments omit one or more protein domains. Immunogenic fragments of IC35 are identified in table 1 of reference 10.

[0319] IC36

[0320] IC36 is a ABC transporter ATP-binding protein. For reference purposes, the amino acid sequence of full length IC36 is SEQ ID NO: 70 herein. In the R6 genome IC36 is spr0678 [84]. The use of IC36 for immunisation is reported in reference 10 (SEQ ID NO: 183 therein).

[0321] Preferred IC36 polypeptides for use with the invention comprise an amino acid sequence: (a) having 50% or more identity (e.g. 60%, 65%, 70%, 75%, 80%, 85%, 90%, 91%, 92%, 93%, 94%, 95%, 96%, 97%, 98%, 99%, 99.5% or more) to SEQ ID NO: 70; and/or (b) comprising a fragment of at least ‘n’ consecutive amino acids of SEQ ID NO: 70, wherein ‘n’ is 7 or more (e.g. 8, 10, 12, 14, 16, 18, 20, 25, 30, 35, 40, 50, 60, 70, 80, 90, 100, 150, 200, 250 or more). These IC36 proteins include variants of SEQ ID NO: 70. Preferred fragments of (b) comprise an epitope from SEQ ID NO: 70. Other preferred fragments lack one or more amino acids (e.g. 1, 2, 3, 4, 5, 6, 7, 8, 9, 10, 15, 20, 25 or more) from the C-terminus and/or one or more amino acids (e.g. 1, 2, 3, 4, 5, 6, 7, 8, 9, 10, 15, 20, 25 or more) from the N-terminus of SEQ ID NO: 70 while retaining at least one epitope of SEQ ID NO: 70. Other fragments omit one or more protein domains. Immunogenic fragments of IC36 are identified in table 1 of reference 10.

[0322] IC37

[0323] IC37 is annotated in reference 10 as a hypothetical protein. For reference purposes, the amino acid sequence of full length IC37 is SEQ ID NO: 71 herein. In the R6 genome IC37 is spr0693 [84]. The use of IC37 for immunisation is reported in reference 10 (SEQ ID NO: 184 therein).

[0324] Preferred IC37 polypeptides for use with the invention comprise an amino acid sequence: (a) having 50% or more identity (e.g. 60%, 65%, 70%, 75%, 80%, 85%, 90%, 91%, 92%, 93%, 94%, 95%, 96%, 97%, 98%, 99%, 99.5% or more) to SEQ ID NO: 71; and/or (b) comprising a fragment of at least ‘n’ consecutive amino acids of SEQ ID NO: 71, wherein ‘n’ is 7 or more (e.g. 8, 10, 12, 14, 16, 18, 20, 25, 30, 35, 40, 50, 60, 70, 80, 90, 100, 150, 200, 250 or more). These IC37 proteins include variants of SEQ ID NO: 71. Preferred fragments of (b) comprise an epitope from SEQ ID NO: 71. Other preferred fragments lack one or more amino acids (e.g. 1, 2, 3, 4, 5, 6, 7, 8, 9, 10, 15, 20, 25 or more) from the C-terminus and/or one or more amino acids (e.g. 1, 2, 3, 4, 5, 6, 7, 8, 9, 10, 15, 20, 25 or more) from the N-terminus of SEQ ID NO: 71 while retaining at least one epitope of SEQ ID NO: 71. Other fragments omit one or more protein domains. Immunogenic fragments of IC37 are identified in table 1 of reference 10.

[0325] IC38

[0326] IC38 is annotated in reference 10 as a nodulin-related protein with truncation. For reference purposes, the amino acid sequence of full length IC38 is SEQ ID NO: 72 herein. In the R6 genome IC38 is spr0814 [84]. The use of IC38 for immunisation is reported in reference 10 (SEQ ID NO: 185 therein).

[0327] Preferred IC38 polypeptides for use with the invention comprise an amino acid sequence: (a) having 50% or more identity (e.g. 60%, 65%, 70%, 75%, 80%, 85%, 90%, 91%, 92%, 93%, 94%, 95%, 96%, 97%, 98%, 99%, 99.5% or more) to SEQ ID NO: 72; and/or (b) comprising a fragment of at least ‘n’ consecutive amino acids of SEQ ID NO: 72, wherein ‘n’ is 7 or more (e.g. 8, 10, 12, 14, 16, 18, 20, 25, 30, 35, 40, 50, 60, 70, 80, 90, 100, 150, 200, 250 or more). These IC38 proteins include variants of SEQ ID NO: 72. Preferred fragments of (b) comprise an epitope from SEQ ID NO: 72. Other preferred fragments lack one or more amino acids (e.g. 1, 2, 3, 4, 5, 6, 7, 8, 9, 10, 15, 20, 25 or more) from the C-terminus and/or one or more amino acids (e.g. 1, 2, 3, 4, 5, 6, 7, 8, 9, 10, 15, 20, 25 or more) from the N-terminus of SEQ ID NO: 72 while retaining at least one epitope of SEQ ID NO: 72. Other fragments omit one or more protein domains. Immunogenic fragments of IC38 are identified in table 1 of reference 10.

[0328] IC39

[0329] IC39 is a Teichoic acid phosphorylcholine esterase/choline binding protein E (cbpE). It may also be known as ‘LytD’. For reference purposes, the amino acid sequence of full length IC39 is SEQ ID NO: 73 herein. In the R6 genome IC39 is spr0831 [84]. The use of IC39 for immunisation is reported in reference 10 (SEQ ID NO: 186 therein).

[0330] Preferred IC39 polypeptides for use with the invention comprise an amino acid sequence: (a) having 50% or more identity (e.g. 60%, 65%, 70%, 75%, 80%, 85%, 90%, 91%, 92%, 93%, 94%, 95%, 96%, 97%, 98%, 99%, 99.5% or more) to SEQ ID NO: 73; and/or (b) comprising a fragment of at least ‘n’ consecutive amino acids of SEQ ID NO: 73, wherein ‘n’ is 7 or more (e.g. 8, 10, 12, 14, 16, 18, 20, 25, 30, 35, 40, 50, 60, 70, 80, 90, 100, 150, 200, 250 or more). These IC39 proteins include variants of SEQ ID NO: 73. Preferred fragments of (b) comprise an epitope from SEQ ID NO: 73. Other preferred fragments lack one or more amino acids (e.g. 1, 2, 3, 4, 5, 6, 7, 8, 9, 10, 15, 20, 25 or more) from the C-terminus and/or one or more amino acids (e.g. 1, 2, 3, 4, 5, 6, 7, 8, 9, 10, 15, 20, 25 or more) from the N-terminus of SEQ ID NO: 73 while retaining at least one epitope of SEQ ID NO: 73. Other fragments omit one or more protein domains. Immunogenic fragments of IC39 are identified in table 1 of reference 10.

[0331] IC40

[0332] IC40 is a glucose-inhibited division protein A. For reference purposes, the amino acid sequence of full length IC40 is SEQ ID NO: 74 herein. In the R6 genome IC40 is spr0844 [84]. The use of IC40 for immunisation is reported in reference 10 (SEQ ID NO: 187 therein).

[0333] Preferred IC40 polypeptides for use with the invention comprise an amino acid sequence: (a) having 50% or more identity (e.g. 60%, 65%, 70%, 75%, 80%, 85%, 90%, 91%, 92%, 93%, 94%, 95%, 96%, 97%, 98%, 99%, 99.5% or more) to SEQ ID NO: 74; and/or (b) comprising a fragment of at least ‘n’ consecutive amino acids of SEQ ID NO: 74, wherein ‘n’ is 7 or more (e.g. 8, 10, 12, 14, 16, 18, 20, 25, 30, 35, 40, 50, 60, 70, 80, 90, 100, 150, 200, 250 or more). These IC40 proteins include variants of SEQ ID NO: 74. Preferred fragments of (b) comprise an epitope from SEQ ID NO: 74. Other preferred fragments lack one or more amino acids (e.g. 1, 2, 3, 4, 5, 6, 7, 8, 9, 10, 15, 20, 25 or more) from the C-terminus and/or one or more amino acids (e.g. 1, 2, 3, 4, 5, 6, 7, 8, 9, 10, 15, 20, 25 or more) from the N-terminus of SEQ ID NO: 74 while retaining at least one epitope of SEQ ID NO: 74. Other fragments omit one or more protein domains. Immunogenic fragments of IC40 are identified in table 1 of reference 10.

[0334] IC41

[0335] IC41 is a Alanine dehydrogenase, truncation. For reference purposes, the amino acid sequence of full length IC41 is SEQ ID NO: 75 herein. In the R6 genome IC41 is spr0854 [84]. The use of IC41 for immunisation is reported in reference 10 (SEQ ID NO: 188 therein).

[0336] Preferred IC41 polypeptides for use with the invention comprise an amino acid sequence: (a) having 50% or more identity (e.g. 60%, 65%, 70%, 75%, 80%, 85%, 90%, 91%, 92%, 93%, 94%, 95%, 96%, 97%, 98%, 99%, 99.5% or more) to SEQ ID NO: 75; and/or (b) comprising a fragment of at least ‘n’ consecutive amino acids of SEQ ID NO: 75, wherein ‘n’ is 7 or more (e.g. 8, 10, 12, 14, 16, 18, 20, 25, 30, 35, 40, 50, 60, 70, 80, 90, 100, 150, 200, 250 or more). These IC41 proteins include variants of SEQ ID NO: 75. Preferred fragments of (b) comprise an epitope from SEQ ID NO: 75. Other preferred fragments lack one or more amino acids (e.g. 1, 2, 3, 4, 5, 6, 7, 8, 9, 10, 15, 20, 25 or more) from the C-terminus and/or one or more amino acids (e.g. 1, 2, 3, 4, 5, 6, 7, 8, 9, 10, 15, 20, 25 or more) from the N-terminus of SEQ ID NO: 75 while retaining at least one epitope of SEQ ID NO: 75. Other fragments omit one or more protein domains. Immunogenic fragments of IC41 are identified in table 1 of reference 10.

[0337] IC42

[0338] IC42 is a glycogen syntase. For reference purposes, the amino acid sequence of full length IC42 is SEQ ID NO: 76 herein. In the R6 genome IC42 is spr1032 [84]. The use of IC42 for immunisation is reported in reference 10 (SEQ ID NO: 191 therein).

[0339] Preferred IC42 polypeptides for use with the invention comprise an amino acid sequence: (a) having 50% or more identity (e.g. 60%, 65%, 70%, 75%, 80%, 85%, 90%, 91%, 92%, 93%, 94%, 95%, 96%, 97%, 98%, 99%, 99.5% or more) to SEQ ID NO: 76; and/or (b) comprising a fragment of at least ‘n’ consecutive amino acids of SEQ ID NO: 76, wherein ‘n’ is 7 or more (e.g. 8, 10, 12, 14, 16, 18, 20, 25, 30, 35, 40, 50, 60, 70, 80, 90, 100, 150, 200, 250 or more). These IC42 proteins include variants of SEQ ID NO: 76. Preferred fragments of (b) comprise an epitope from SEQ ID NO: 76. Other preferred fragments lack one or more amino acids (e.g. 1, 2, 3, 4, 5, 6, 7, 8, 9, 10, 15, 20, 25 or more) from the C-terminus and/or one or more amino acids (e.g. 1, 2, 3, 4, 5, 6, 7, 8, 9, 10, 15, 20, 25 or more) from the N-terminus of SEQ ID NO: 76 while retaining at least one epitope of SEQ ID NO: 76. Other fragments omit one or more protein domains. Immunogenic fragments of IC42 are identified in table 1 of reference 10.

[0340] IC43

[0341] IC43 is a Immunoglobulin A1 protease. For reference purposes, the amino acid sequence of full length IC43 is SEQ ID NO: 77 herein. The use of IC43 for immunisation is reported in reference 10 (SEQ ID NO: 192 therein).

[0342] Preferred IC43 polypeptides for use with the invention comprise an amino acid sequence: (a) having 50% or more identity (e.g. 60%, 65%, 70%, 75%, 80%, 85%, 90%, 91%, 92%, 93%, 94%, 95%, 96%, 97%, 98%, 99%, 99.5% or more) to SEQ ID NO: 77; and/or (b) comprising a fragment of at least ‘n’ consecutive amino acids of SEQ ID NO: 77, wherein ‘n’ is 7 or more (e.g. 8, 10, 12, 14, 16, 18, 20, 25, 30, 35, 40, 50, 60, 70, 80, 90, 100, 150, 200, 250 or more). These IC43 proteins include variants of SEQ ID NO: 77. Preferred fragments of (b) comprise an epitope from SEQ ID NO: 77. Other preferred fragments lack one or more amino acids (e.g. 1, 2, 3, 4, 5, 6, 7, 8, 9, 10, 15, 20, 25 or more) from the C-terminus and/or one or more amino acids (e.g. 1, 2, 3, 4, 5, 6, 7, 8, 9, 10, 15, 20, 25 or more) from the N-terminus of SEQ ID NO: 77 while retaining at least one epitope of SEQ ID NO: 77. Other fragments omit one or more protein domains. Immunogenic fragments of IC43 are identified in table 1 of reference 10.

[0343] IC44

[0344] IC44 is a Uncharacterized restriction enzyme. For reference purposes, the amino acid sequence of full length IC44 is SEQ ID NO: 78 herein. In the R6 genome IC44 is spr1101 [84]. The use of IC44 for immunisation is reported in reference 10 (SEQ ID NO: 195 therein).

[0345] Preferred IC44 polypeptides for use with the invention comprise an amino acid sequence: (a) having 50% or more identity (e.g. 60%, 65%, 70%, 75%, 80%, 85%, 90%, 91%, 92%, 93%, 94%, 95%, 96%, 97%, 98%, 99%, 99.5% or more) to SEQ ID NO: 78; and/or (b) comprising a fragment of at least ‘n’ consecutive amino acids of SEQ ID NO: 78, wherein ‘n’ is 7 or more (e.g. 8, 10, 12, 14, 16, 18, 20, 25, 30, 35, 40, 50, 60, 70, 80, 90, 100, 150, 200, 250 or more). These IC44 proteins include variants of SEQ ID NO: 78. Preferred fragments of (b) comprise an epitope from SEQ ID NO: 78. Other preferred fragments lack one or more amino acids (e.g. 1, 2, 3, 4, 5, 6, 7, 8, 9, 10, 15, 20, 25 or more) from the C-terminus and/or one or more amino acids (e.g. 1, 2, 3, 4, 5, 6, 7, 8, 9, 10, 15, 20, 25 or more) from the N-terminus of SEQ ID NO: 78 while retaining at least one epitope of SEQ ID NO: 78. Other fragments omit one or more protein domains. Immunogenic fragments of IC44 are identified in table 1 of reference 10.

[0346] IC45

[0347] IC45 is a Response regulator. For reference purposes, the amino acid sequence of full length IC45 is SEQ ID NO: 79 herein. In the R6 genome IC45 is spr1107 [84]. The use of IC45 for immunisation is reported in reference 10 (SEQ ID NO: 196 therein).

[0348] Preferred IC45 polypeptides for use with the invention comprise an amino acid sequence: (a) having 50% or more identity (e.g. 60%, 65%, 70%, 75%, 80%, 85%, 90%, 91%, 92%, 93%, 94%, 95%, 96%, 97%, 98%, 99%, 99.5% or more) to SEQ ID NO: 79; and/or (b) comprising a fragment of at least ‘n’ consecutive amino acids of SEQ ID NO: 79, wherein ‘n’ is 7 or more (e.g. 8, 10, 12, 14, 16, 18, 20, 25, 30, 35, 40, 50, 60, 70, 80, 90, 100, 150, 200, 250 or more). These IC45 proteins include variants of SEQ ID NO: 79. Preferred fragments of (b) comprise an epitope from SEQ ID NO: 79. Other preferred fragments lack one or more amino acids (e.g. 1, 2, 3, 4, 5, 6, 7, 8, 9, 10, 15, 20, 25 or more) from the C-terminus and/or one or more amino acids (e.g. 1, 2, 3, 4, 5, 6, 7, 8, 9, 10, 15, 20, 25 or more) from the N-terminus of SEQ ID NO: 79 while retaining at least one epitope of SEQ ID NO: 79. Other fragments omit one or more protein domains. Immunogenic fragments of IC45 are identified in table 1 of reference 10.

[0349] IC46

[0350] IC46 is a ABC transporter membrane spanning permease. For reference purposes, the amino acid sequence of full length IC46 is SEQ ID NO: 80 herein. In the R6 genome IC46 is spr1120 [84]. The use of IC46 for immunisation is reported in reference 10 (SEQ ID NO: 197 therein).

[0351] Preferred IC46 polypeptides for use with the invention comprise an amino acid sequence: (a) having 50% or more identity (e.g. 60%, 65%, 70%, 75%, 80%, 85%, 90%, 91%, 92%, 93%, 94%, 95%, 96%, 97%, 98%, 99%, 99.5% or more) to SEQ ID NO: 80; and/or (b) comprising a fragment of at least ‘n’ consecutive amino acids of SEQ ID NO: 80, wherein ‘n’ is 7 or more (e.g. 8, 10, 12, 14, 16, 18, 20, 25, 30, 35, 40, 50, 60, 70, 80, 90, 100, 150, 200, 250 or more). These IC46 proteins include variants of SEQ ID NO: 80. Preferred fragments of (b) comprise an epitope from SEQ ID NO: 80. Other preferred fragments lack one or more amino acids (e.g. 1, 2, 3, 4, 5, 6, 7, 8, 9, 10, 15, 20, 25 or more) from the C-terminus and/or one or more amino acids (e.g. 1, 2, 3, 4, 5, 6, 7, 8, 9, 10, 15, 20, 25 or more) from the N-terminus of SEQ ID NO: 80 while retaining at least one epitope of SEQ ID NO: 80. Other fragments omit one or more protein domains. Immunogenic fragments of IC46 are identified in table 1 of reference 10.

[0352] IC47

[0353] IC47 is a Signal recognition particle. For reference purposes, the amino acid sequence of full length IC47 is SEQ ID NO: 81 herein. In the R6 genome IC47 is spr1166 [84]. The use of IC47 for immunisation is reported in reference 10 (SEQ ID NO: 198 therein).

[0354] Preferred IC47 polypeptides for use with the invention comprise an amino acid sequence: (a) having 50% or more identity (e.g. 60%, 65%, 70%, 75%, 80%, 85%, 90%, 91%, 92%, 93%, 94%, 95%, 96%, 97%, 98%, 99%, 99.5% or more) to SEQ ID NO: 81; and/or (b) comprising a fragment of at least ‘n’ consecutive amino acids of SEQ ID NO: 81, wherein ‘n’ is 7 or more (e.g. 8, 10, 12, 14, 16, 18, 20, 25, 30, 35, 40, 50, 60, 70, 80, 90, 100, 150, 200, 250 or more). These IC47 proteins include variants of SEQ ID NO: 81. Preferred fragments of (b) comprise an epitope from SEQ ID NO: 81. Other preferred fragments lack one or more amino acids (e.g. 1, 2, 3, 4, 5, 6, 7, 8, 9, 10, 15, 20, 25 or more) from the C-terminus and/or one or more amino acids (e.g. 1, 2, 3, 4, 5, 6, 7, 8, 9, 10, 15, 20, 25 or more) from the N-terminus of SEQ ID NO: 81 while retaining at least one epitope of SEQ ID NO: 81. Other fragments omit one or more protein domains. Immunogenic fragments of IC47 are identified in table 1 of reference 10.

[0355] IC48

[0356] IC48 is a N-acetylmannosamine-6-phosphate 2-epimerase. For reference purposes, the amino acid sequence of full length IC48 is SEQ ID NO: 82 herein. In the R6 genome IC48 is spr1529 [84]. The use of IC48 for immunisation is reported in reference 10 (SEQ ID NO: 199 therein).

[0357] Preferred IC48 polypeptides for use with the invention comprise an amino acid sequence: (a) having 50% or more identity (e.g. 60%, 65%, 70%, 75%, 80%, 85%, 90%, 91%, 92%, 93%, 94%, 95%, 96%, 97%, 98%, 99%, 99.5% or more) to SEQ ID NO: 82; and/or (b) comprising a fragment of at least ‘n’ consecutive amino acids of SEQ ID NO: 82, wherein ‘n’ is 7 or more (e.g. 8, 10, 12, 14, 16, 18, 20, 25, 30, 35, 40, 50, 60, 70, 80, 90, 100, 150, 200, 250 or more). These IC48 proteins include variants of SEQ ID NO: 82. Preferred fragments of (b) comprise an epitope from SEQ ID NO: 82. Other preferred fragments lack one or more amino acids (e.g. 1, 2, 3, 4, 5, 6, 7, 8, 9, 10, 15, 20, 25 or more) from the C-terminus and/or one or more amino acids (e.g. 1, 2, 3, 4, 5, 6, 7, 8, 9, 10, 15, 20, 25 or more) from the N-terminus of SEQ ID NO: 82 while retaining at least one epitope of SEQ ID NO: 82. Other fragments omit one or more protein domains. Immunogenic fragments of IC48 are identified in table 1 of reference 10.

[0358] IC49

[0359] IC49 is a chorismate synthase. For reference purposes, the amino acid sequence of full length IC49 is SEQ ID NO: 83 herein. In the R6 genome IC49 is spr1232 [84]. The use of IC49 for immunisation is reported in reference 10 (SEQ ID NO: 200 therein).

[0360] Preferred IC49 polypeptides for use with the invention comprise an amino acid sequence: (a) having 50% or more identity (e.g. 60%, 65%, 70%, 75%, 80%, 85%, 90%, 91%, 92%, 93%, 94%, 95%, 96%, 97%, 98%, 99%, 99.5% or more) to SEQ ID NO: 83; and/or (b) comprising a fragment of at least ‘n’ consecutive amino acids of SEQ ID NO: 83, wherein ‘n’ is 7 or more (e.g. 8, 10, 12, 14, 16, 18, 20, 25, 30, 35, 40, 50, 60, 70, 80, 90, 100, 150, 200, 250 or more). These IC49 proteins include variants of SEQ ID NO: 83. Preferred fragments of (b) comprise an epitope from SEQ ID NO: 83. Other preferred fragments lack one or more amino acids (e.g. 1, 2, 3, 4, 5, 6, 7, 8, 9, 10, 15, 20, 25 or more) from the C-terminus and/or one or more amino acids (e.g. 1, 2, 3, 4, 5, 6, 7, 8, 9, 10, 15, 20, 25 or more) from the N-terminus of SEQ ID NO: 83 while retaining at least one epitope of SEQ ID NO: 83. Other fragments omit one or more protein domains. Immunogenic fragments of IC49 are identified in table 1 of reference 10.

[0361] IC50

[0362] IC50 is annotated in reference 10 as a hypothetical protein. For reference purposes, the amino acid sequence of full length IC50 is SEQ ID NO: 84 herein. In the R6 genome IC50 is spr1236 [84]. The use of IC50 for immunisation is reported in reference 10 (SEQ ID NO: 201 therein).

[0363] Preferred IC50 polypeptides for use with the invention comprise an amino acid sequence: (a) having 50% or more identity (e.g. 60%, 65%, 70%, 75%, 80%, 85%, 90%, 91%, 92%, 93%, 94%, 95%, 96%, 97%, 98%, 99%, 99.5% or more) to SEQ ID NO: 84; and/or (b) comprising a fragment of at least consecutive amino acids of SEQ ID NO: 84, wherein ‘n’ is 7 or more (e.g. 8, 10, 12, 14, 16, 18, 20, 25, 30, 35, 40, 50, 60, 70, 80, 90, 100, 150, 200, 250 or more). These IC50 proteins include variants of SEQ ID NO: S4. Preferred fragments of (b) comprise an epitope from SEQ ID NO: 84. Other preferred fragments lack one or more amino acids (e.g. 1, 2, 3, 4, 5, 6, 7, 8, 9, 10, 15, 20, 25 or more) from the C-terminus and/or one or more amino acids (e.g. 1, 2, 3, 4, 5, 6, 7, 8, 9, 10, 15, 20, 25 or more) from the N-terminus of SEQ ID NO: 84 while retaining at least one epitope of SEQ ID NO: 84. Other fragments omit one or more protein domains. Immunogenic fragments of IC50 are identified in table 1 of reference 10.

[0364] IC51

[0365] IC51 is a Protease. For reference purposes, the amino acid sequence of full length IC51 is SEQ ID NO: 85 herein. In the R6 genome IC51 is spr1284 [84]. The use of IC51 for immunisation is reported in reference 10 (SEQ ID NO: 202 therein).

[0366] Preferred IC51 polypeptides for use with the invention comprise an amino acid sequence: (a) having 50% or more identity (e.g. 60%, 65%, 70%, 75%, 80%, 85%, 90%, 91%, 92%, 93%, 94%, 95%, 96%, 97%, 98%, 99%, 99.5% or more) to SEQ ID NO: 85; and/or (b) comprising a fragment of at least consecutive amino acids of SEQ ID NO: 85, wherein ‘n’ is 7 or more (e.g. 8, 10, 12, 14, 16, 18, 20, 25, 30, 35, 40, 50, 60, 70, 80, 90, 100, 150, 200, 250 or more). These IC51 proteins include variants of SEQ ID NO: 85. Preferred fragments of (b) comprise an epitope from SEQ ID NO: 85. Other preferred fragments lack one or more amino acids (e.g. 1, 2, 3, 4, 5, 6, 7, 8, 9, 10, 15, 20, 25 or more) from the C-terminus and/or one or more amino acids (e.g. 1, 2, 3, 4, 5, 6, 7, 8, 9, 10, 15, 20, 25 or more) from the N-terminus of SEQ ID NO: 85 while retaining at least one epitope of SEQ ID NO: 85. Other fragments omit one or more protein domains. Immunogenic fragments of IC51 are identified in table 1 of reference 10.

[0367] IC52

[0368] IC52 is a annotated in reference 10 as an oxidoreductase or aldo/keto reductase. For reference purposes, the amino acid sequence of full length IC52 is SEQ ID NO: 86 herein. In the R6 genome IC52 is spr1332 [84]. The use of IC52 for immunisation is reported in reference 10 (SEQ ID NO: 203 therein).

[0369] Preferred IC52 polypeptides for use with the invention comprise an amino acid sequence: (a) having 50% or more identity (e.g. 60%, 65%, 70%, 75%, 80%, 85%, 90%, 91%, 92%, 93%, 94%, 95%, 96%, 97%, 98%, 99%, 99.5% or more) to SEQ ID NO: 86; and/or (b) comprising a fragment of at least ‘n’ consecutive amino acids of SEQ ID NO: 86, wherein ‘n’ is 7 or more (e.g. 8, 10, 12, 14, 16, 18, 20, 25, 30, 35, 40, 50, 60, 70, 80, 90, 100, 150, 200, 250 or more). These IC52 proteins include variants of SEQ ID NO: 86. Preferred fragments of (b) comprise an epitope from SEQ ID NO: 86. Other preferred fragments lack one or more amino acids (e.g. 1, 2, 3, 4, 5, 6, 7, 8, 9, 10, 15, 20, 25 or more) from the C-terminus and/or one or more amino acids (e.g. 1, 2, 3, 4, 5, 6, 7, 8, 9, 10, 15, 20, 25 or more) from the N-terminus of SEQ ID NO: 86 while retaining at least one epitope of SEQ ID NO: 86. Other fragments omit one or more protein domains. Immunogenic fragments of IC52 are identified in table 1 of reference 10.

[0370] IC53

[0371] IC53 is annotated in reference 10 as a hypothetical protein. For reference purposes, the amino acid sequence of full length IC53 is SEQ ID NO: 87 herein. In the R6 genome IC53 is spr1370 [84]. The use of IC53 for immunisation is reported in reference 10 (SEQ ID NO: 204 therein).

[0372] Preferred IC53 polypeptides for use with the invention comprise an amino acid sequence: (a) having 50% or more identity (e.g. 60%, 65%, 70%, 75%, 80%, 85%, 90%, 91%, 92%, 93%, 94%, 95%, 96%, 97%, 98%, 99%, 99.5% or more) to SEQ ID NO: 87; and/or (b) comprising a fragment of at least ‘n’ consecutive amino acids of SEQ ID NO: 87, wherein ‘n’ is 7 or more (e.g. 8, 10, 12, 14, 16, 18, 20, 25, 30, 35, 40, 50, 60, 70, 80, 90, 100, 150, 200, 250 or more). These IC53 proteins include variants of SEQ ID NO: 87. Preferred fragments of (b) comprise an epitope from SEQ ID NO: 87. Other preferred fragments lack one or more amino acids (e.g. 1, 2, 3, 4, 5, 6, 7, 8, 9, 10, 15, 20, 25 or more) from the C-terminus and/or one or more amino acids (e.g. 1, 2, 3, 4, 5, 6, 7, 8, 9, 10, 15, 20, 25 or more) from the N-terminus of SEQ ID NO: 87 while retaining at least one epitope of SEQ ID NO: 87. Other fragments omit one or more protein domains. Immunogenic fragments of IC53 are identified in table 1 of reference 10.

[0373] IC54

[0374] IC54 is annotated as a conserved domain protein. For reference purposes, the amino acid sequence of full length IC54 is SEQ ID NO: 88 herein. In the R6 genome IC54 is spr1374 [84]. The use of IC54 for immunisation is reported in reference 10 (SEQ ID NO: 205 therein).

[0375] Preferred IC54 polypeptides for use with the invention comprise an amino acid sequence: (a) having 50% or more identity (e.g. 60%, 65%, 70%, 75%, 80%, 85%, 90%, 91%, 92%, 93%, 94%, 95%, 96%, 97%, 98%, 99%, 99.5% or more) to SEQ ID NO: 88; and/or (b) comprising a fragment of at least ‘n’ consecutive amino acids of SEQ ID NO: 88, wherein ‘n’ is 7 or more (e.g. 8, 10, 12, 14, 16, 18, 20, 25, 30, 35, 40, 50, 60, 70, 80, 90, 100, 150, 200, 250 or more). These IC54 proteins include variants of SEQ ID NO: 88. Preferred fragments of (b) comprise an epitope from SEQ ID NO: 88. Other preferred fragments lack one or more amino acids (e.g. 1, 2, 3, 4, 5, 6, 7, 8, 9, 10, 15, 20, 25 or more) from the C-terminus and/or one or more amino acids (e.g. 1, 2, 3, 4, 5, 6, 7, 8, 9, 10, 15, 20, 25 or more) from the N-terminus of SEQ ID NO: 88 while retaining at least one epitope of SEQ ID NO: 88. Other fragments omit one or more protein domains. Immunogenic fragments of IC54 are identified in table 1 of reference 10.

[0376] IC55

[0377] IC55 is a ABC transporter substrate-binding protein. For reference purposes, the amino acid sequence of full length IC55 is SEQ ID NO: 89 herein. In the R6 genome IC55 is spr1382 [84]. The use of IC55 for immunisation is reported in reference 10 (SEQ ID NO: 206 therein).

[0378] Preferred IC55 polypeptides for use with the invention comprise an amino acid sequence: (a) having 50% or more identity (e.g. 60%, 65%, 70%, 75%, 80%, 85%, 90%, 91%, 92%, 93%, 94%, 95%, 96%, 97%, 98%, 99%, 99.5% or more) to SEQ ID NO: 89; and/or (b) comprising a fragment of at least ‘n’ consecutive amino acids of SEQ ID NO: 89, wherein ‘n’ is 7 or more (e.g. 8, 10, 12, 14, 16, 18, 20, 25, 30, 35, 40, 50, 60, 70, 80, 90, 100, 150, 200, 250 or more). These IC55 proteins include variants of SEQ ID NO: 89. Preferred fragments of (b) comprise an epitope from SEQ ID NO: 89. Other preferred fragments lack one or more amino acids (e.g. 1, 2, 3, 4, 5, 6, 7, 8, 9, 10, 15, 20, 25 or more) from the C-terminus and/or one or more amino acids (e.g. 1, 2, 3, 4, 5, 6, 7, 8, 9, 10, 15, 20, 25 or more) from the N-terminus of SEQ ID NO: 89 while retaining at least one epitope of SEQ ID NO: 89. Other fragments omit one or more protein domains. Immunogenic fragments of IC55 are identified in table 1 of reference 10.

[0379] IC56

[0380] IC56 is annotated in reference 10 as a hypothetical protein. For reference purposes, the amino acid sequence of full length IC56 is SEQ ID NO: 90 herein. In the R6 genome IC56 is spr1457 [84]. The use of IC56 for immunisation is reported in reference 10 (SEQ ID NO: 208 therein).

[0381] Preferred IC56 polypeptides for use with the invention comprise an amino acid sequence: (a) having 50% or more identity (e.g. 60%, 65%, 70%, 75%, 80%, 85%, 90%, 91%, 92%, 93%, 94%, 95%, 96%, 97%, 98%, 99%, 99.5% or more) to SEQ ID NO: 90; and/or (b) comprising a fragment of at least ‘n’ consecutive amino acids of SEQ ID NO: 90, wherein is 7 or more (e.g. 8, 10, 12, 14, 16, 18, 20, 25, 30, 35, 40, 50, 60, 70, 80, 90, 100, 150, 200, 250 or more). These IC56 proteins include variants of SEQ ID NO: 90. Preferred fragments of (b) comprise an epitope from SEQ ID NO: 90. Other preferred fragments lack one or more amino acids (e.g. 1, 2, 3, 4, 5, 6, 7, 8, 9, 10, 15, 20, 25 or more) from the C-terminus and/or one or more amino acids (e.g. 1, 2, 3, 4, 5, 6, 7, 8, 9, 10, 15, 20, 25 or more) from the N-terminus of SEQ ID NO: 90 while retaining at least one epitope of SEQ ID NO: 90. Other fragments omit one or more protein domains. Immunogenic fragments of IC56 are identified in table 1 of reference 10.

[0382] IC57

[0383] IC57 is a Cell-division initiation protein. For reference purposes, the amino acid sequence of full length IC57 is SEQ ID NO: 91 herein. In the R6 genome IC57 is spr1505 [84]. The use of IC57 for immunisation is reported in reference 10 (SEQ ID NO: 209 therein).

[0384] Preferred IC57 polypeptides for use with the invention comprise an amino acid sequence: (a) having 50% or more identity (e.g. 60%, 65%, 70%, 75%, 80%, 85%, 90%, 91%, 92%, 93%, 94%, 95%, 96%, 97%, 98%, 99%, 99.5% or more) to SEQ ID NO: 91; and/or (b) comprising a fragment of at least ‘n’ consecutive amino acids of SEQ ID NO: 91, wherein ‘n’ is 7 or more (e.g. 8, 10, 12, 14, 16, 18, 20, 25, 30, 35, 40, 50, 60, 70, 80, 90, 100, 150, 200, 250 or more). These IC57 proteins include variants of SEQ ID NO: 91. Preferred fragments of (b) comprise an epitope from SEQ ID NO: 91. Other preferred fragments lack one or more amino acids (e.g. 1, 2, 3, 4, 5, 6, 7, 8, 9, 10, 15, 20, 25 or more) from the C-terminus and/or one or more amino acids (e.g. 1, 2, 3, 4, 5, 6, 7, 8, 9, 10, 15, 20, 25 or more) from the N-terminus of SEQ ID NO: 91 while retaining at least one epitope of SEQ ID NO: 91. Other fragments omit one or more protein domains. Immunogenic fragments of IC57 are identified in table 1 of reference 10.

[0385] IC58

[0386] IC58 is annotated in reference 10 as ylmF protein. For reference purposes, the amino acid sequence of full length IC58 is SEQ ID NO: 92 herein. In the R6 genome IC58 is spr1508 [84]. The use of IC58 for immunisation is reported in reference 10 (SEQ ID NO: 210 therein).

[0387] Preferred IC58 polypeptides for use with the invention comprise an amino acid sequence: (a) having 50% or more identity (e.g. 60%, 65%, 70%, 75%, 80%, 85%, 90%, 91%, 92%, 93%, 94%, 95%, 96%, 97%, 98%, 99%, 99.5% or more) to SEQ ID NO: 92; and/or (b) comprising a fragment of at least ‘n’ consecutive amino acids of SEQ ID NO: 92, wherein ‘n’ is 7 or more (e.g. 8, 10, 12, 14, 16, 18, 20, 25, 30, 35, 40, 50, 60, 70, 80, 90, 100, 150, 200, 250 or more). These IC58 proteins include variants of SEQ ID NO: 92. Preferred fragments of (b) comprise an epitope from SEQ ID NO: 92. Other preferred fragments lack one or more amino acids (e.g. 1, 2, 3, 4, 5, 6, 7, 8, 9, 10, 15, 20, 25 or more) from the C-terminus and/or one or more amino acids (e.g. 1, 2, 3, 4, 5, 6, 7, 8, 9, 10, 15, 20, 25 or more) from the N-terminus of SEQ ID NO: 92 while retaining at least one epitope of SEQ ID NO: 92. Other fragments omit one or more protein domains. Immunogenic fragments of IC58 are identified in table 1 of reference 10.

[0388] IC59

[0389] IC59 is a N-acetylneuraminate lyase subunit. For reference purposes, the amino acid sequence of full length IC59 is SEQ ID NO: 93 herein. In the R6 genome IC59 is spr1186 [84]. The use of IC59 for immunisation is reported in reference 10 (SEQ ID NO: 211 therein).

[0390] Preferred IC59 polypeptides for use with the invention comprise an amino acid sequence: (a) having 50% or more identity (e.g. 60%, 65%, 70%, 75%, 80%, 85%, 90%, 91%, 92%, 93%, 94%, 95%, 96%, 97%, 98%, 99%, 99.5% or more) to SEQ ID NO: 93; and/or (b) comprising a fragment of at least ‘n’ consecutive amino acids of SEQ ID NO: 93, wherein ‘n’ is 7 or more (e.g. 8, 10, 12, 14, 16, 18, 20, 25, 30, 35, 40, 50, 60, 70, 80, 90, 100, 150, 200, 250 or more). These IC59 proteins include variants of SEQ ID NO: 93. Preferred fragments of (b) comprise an epitope from SEQ ID NO: 93. Other preferred fragments lack one or more amino acids (e.g. 1, 2, 3, 4, 5, 6, 7, 8, 9, 10, 15, 20, 25 or more) from the C-terminus and/or one or more amino acids (e.g. 1, 2, 3, 4, 5, 6, 7, 8, 9, 10, 15, 20, 25 or more) from the N-terminus of SEQ ID NO: 93 while retaining at least one epitope of SEQ ID NO: 93. Other fragments omit one or more protein domains. Immunogenic fragments of IC59 are identified in table 1 of reference 10.

[0391] IC60

[0392] IC60 is a Eukaryotic-type serine/threonine kinase (StkP). For reference purposes, the amino acid sequence of full length IC60 is SEQ ID NO: 94 herein. In the R6 genome IC60 is spr1577 [84]. The use of IC60 for immunisation is reported in reference 10 (SEQ ID NO: 214 therein), and it is reported to be a lead vaccine candidate in reference 78.

[0393] Preferred IC60 polypeptides for use with the invention comprise an amino acid sequence: (a) having 50% or more identity (e.g. 60%, 65%, 70%, 75%, 80%, 85%, 90%, 91%, 92%, 93%, 94%, 95%, 96%, 97%, 98%, 99%, 99.5% or more) to SEQ ID NO: 94; and/or (b) comprising a fragment of at least ‘n’ consecutive amino acids of SEQ ID NO: 94, wherein ‘n’ is 7 or more (e.g. 8, 10, 12, 14, 16, 18, 20, 25, 30, 35, 40, 50, 60, 70, 80, 90, 100, 150, 200, 250 or more). These IC60 proteins include variants of SEQ ID NO: 94. Preferred fragments of (b) comprise an epitope from SEQ ID NO: 94. Other preferred fragments lack one or more amino acids (e.g. 1, 2, 3, 4, 5, 6, 7, 8, 9, 10, 15, 20, 25 or more) from the C-terminus and/or one or more amino acids (e.g. 1, 2, 3, 4, 5, 6, 7, 8, 9, 10, 15, 20, 25 or more) from the N-terminus of SEQ ID NO: 94 while retaining at least one epitope of SEQ ID NO: 94. Other fragments omit one or more protein domains. Immunogenic fragments of IC60 are identified in table 1 of reference 10. A further useful fragment is disclosed as SEQ ID NO: 2 in reference 59 (corresponding to amino acids 345-659 of SEQ ID NO: 94 herein).

[0394] IC61

[0395] IC61 is a methionyl-tRNA formyltransferase. For reference purposes, the amino acid sequence of full length IC61 is SEQ ID NO: 95 herein. In the R6 genome IC61 is spr1580 [84]. The use of IC61 for immunisation is reported in reference 10 (SEQ ID NO: 215 therein).

[0396] Preferred IC61 polypeptides for use with the invention comprise an amino acid sequence: (a) having 50% or more identity (e.g. 60%, 65%, 70%, 75%, 80%, 85%, 90%, 91%, 92%, 93%, 94%, 95%, 96%, 97%, 98%, 99%, 99.5% or more) to SEQ ID NO: 95; and/or (b) comprising a fragment of at least ‘n’ consecutive amino acids of SEQ ID NO: 95, wherein ‘n’ is 7 or more (e.g. 8, 10, 12, 14, 16, 18, 20, 25, 30, 35, 40, 50, 60, 70, 80, 90, 100, 150, 200, 250 or more). These IC61 proteins include variants of SEQ ID NO: 95. Preferred fragments of (b) comprise an epitope from SEQ ID NO: 95. Other preferred fragments lack one or more amino acids (e.g. 1, 2, 3, 4, 5, 6, 7, 8, 9, 10, 15, 20, 25 or more) from the C-terminus and/or one or more amino acids (e.g. 1, 2, 3, 4, 5, 6, 7, 8, 9, 10, 15, 20, 25 or more) from the N-terminus of SEQ ID NO: 95 while retaining at least one epitope of SEQ ID NO: 95. Other fragments omit one or more protein domains. Immunogenic fragments of IC61 are identified in table 1 of reference 10.

[0397] IC62

[0398] IC62 is a translocase. For reference purposes, the amino acid sequence of full length IC62 is SEQ ID NO: 96 herein. In the R6 genome IC62 is spr1544 [84]. The use of IC62 for immunisation is reported in reference 10 (SEQ ID NO: 216 therein).

[0399] Preferred IC62 polypeptides for use with the invention comprise an amino acid sequence: (a) having 50% or more identity (e.g. 60%, 65%, 70%, 75%, 80%, 85%, 90%, 91%, 92%, 93%, 94%, 95%, 96%, 97%, 98%, 99%, 99.5% or more) to SEQ ID NO: 96; and/or (b) comprising a fragment of at least ‘n’ consecutive amino acids of SEQ ID NO: 96, wherein ‘n’ is 7 or more (e.g. 8, 10, 12, 14, 16, 18, 20, 25, 30, 35, 40, 50, 60, 70, 80, 90, 100, 150, 200, 250 or more). These IC62 proteins include variants of SEQ ID NO: 96. Preferred fragments of (b) comprise an epitope from SEQ ID NO: 96. Other preferred fragments lack one or more amino acids (e.g. 1, 2, 3, 4, 5, 6, 7, 8, 9, 10, 15, 20, 25 or more) from the C-terminus and/or one or more amino acids (e.g. 1, 2, 3, 4, 5, 6, 7, 8, 9, 10, 15, 20, 25 or more) from the N-terminus of SEQ ID NO: 96 while retaining at least one epitope of SEQ ID NO: 96. Other fragments omit one or more protein domains. Immunogenic fragments of IC62 are identified in table 1 of reference 10.

[0400] IC63

[0401] IC63 is annotated in reference 10 as a cell wall surface anchor family protein. For reference purposes, the amino acid sequence of full length IC63 is SEQ ID NO: 97 herein. In the R6 genome IC63 is spr1403 [84]. The use of IC63 for immunisation is reported in reference 10 (SEQ ID NO: 217 therein).

[0402] Preferred IC63 polypeptides for use with the invention comprise an amino acid sequence: (a) having 50% or more identity (e.g. 60%, 65%, 70%, 75%, 80%, S5%, 90%, 91%, 92%, 93%, 94%, 95%, 96%, 97%, 98%, 99%, 99.5% or more) to SEQ ID NO: 97; and/or (b) comprising a fragment of at least ‘n’ consecutive amino acids of SEQ ID NO: 97, wherein ‘n’ is 7 or more (e.g. 8, 10, 12, 14, 16, 18, 20, 25, 30, 35, 40, 50, 60, 70, 80, 90, 100, 150, 200, 250 or more). These IC63 proteins include variants of SEQ ID NO: 97. Preferred fragments of (b) comprise an epitope from SEQ ID NO: 97. Other preferred fragments lack one or more amino acids (e.g. 1, 2, 3, 4, 5, 6, 7, 8, 9, 10, 15, 20, 25 or more) from the C-terminus and/or one or more amino acids (e.g. 1, 2, 3, 4, 5, 6, 7, 8, 9, 10, 15, 20, 25 or more) from the N-terminus of SEQ ID NO: 97 while retaining at least one epitope of SEQ ID NO: 97. Other fragments omit one or more protein domains. Immunogenic fragments of IC63 are identified in table 1 of reference 10.

[0403] IC64

[0404] IC64 is annotated in reference 10 as a putative general stress protein 24. For reference purposes, the amino acid sequence of full length IC64 is SEQ ID NO: 98 herein. In the R6 genome IC64 is spr1625 [84]. The use of IC64 for immunisation is reported in reference 10 (SEQ ID NO: 218 therein).

[0405] Preferred IC64 polypeptides for use with the invention comprise an amino acid sequence: (a) having 50% or more identity (e.g. 60%, 65%, 70%, 75%, 80%, 85%, 90%, 91%, 92%, 93%, 94%, 95%, 96%, 97%, 98%, 99%, 99.5% or more) to SEQ ID NO: 98; and/or (b) comprising a fragment of at least ‘n’ consecutive amino acids of SEQ ID NO: 98, wherein ‘n’ is 7 or more (e.g. 8, 10, 12, 14, 16, 18, 20, 25, 30, 35, 40, 50, 60, 70, 80, 90, 100, 150, 200, 250 or more). These IC64 proteins include variants of SEQ ID NO: 98. Preferred fragments of (b) comprise an epitope from SEQ ID NO: 98. Other preferred fragments lack one or more amino acids (e.g. 1, 2, 3, 4, 5, 6, 7, 8, 9, 10, 15, 20, 25 or more) from the C-terminus and/or one or more amino acids (e.g. 1, 2, 3, 4, 5, 6, 7, 8, 9, 10, 15, 20, 25 or more) from the N-terminus of SEQ ID NO: 98 while retaining at least one epitope of SEQ ID NO: 98. Other fragments omit one or more protein domains. Immunogenic fragments of IC64 are identified in table 1 of reference 10.

[0406] IC65

[0407] IC65 is a ABC transporter ATP-binding protein. For reference purposes, the amino acid sequence of full length IC65 is SEQ ID NO: 99 herein. In the R6 genome IC65 is spr1704 [84]. The use of IC65 for immunisation is reported in reference 10 (SEQ ID NO: 219 therein).

[0408] Preferred IC65 polypeptides for use with the invention comprise an amino acid sequence: (a) having 50% or more identity (e.g. 60%, 65%, 70%, 75%, 80%, 85%, 90%, 91%, 92%, 93%, 94%, 95%, 96%, 97%, 98%, 99%, 99.5% or more) to SEQ ID NO: 99; and/or (b) comprising a fragment of at least ‘n’ consecutive amino acids of SEQ ID NO: 99, wherein ‘n’ is 7 or more (e.g. 8, 10, 12, 14, 16, 18, 20, 25, 30, 35, 40, 50, 60, 70, 80, 90, 100, 150, 200, 250 or more). These IC65 proteins include variants of SEQ ID NO: 99. Preferred fragments of (b) comprise an epitope from SEQ ID NO: 99. Other preferred fragments lack one or more amino acids (e.g. 1, 2, 3, 4, 5, 6, 7, 8, 9, 10, 15, 20, 25 or more) from the C-terminus and/or one or more amino acids (e.g. 1, 2, 3, 4, 5, 6, 7, 8, 9, 10, 15, 20, 25 or more) from the N-terminus of SEQ ID NO: 99 while retaining at least one epitope of SEQ ID NO: 99. Other fragments omit one or more protein domains. Immunogenic fragments of IC65 are identified in table 1 of reference 10.

[0409] IC66

[0410] IC66 is, as mentioned above, a variant form of spr1707. Useful IC66 polypeptides for use with the invention comprise an amino acid sequence: (a) having 50% or more identity (e.g. 60%, 65%, 70%, 75%, 80%, 85%, 90%, 91%, 92%, 93%, 94%, 95%, 96%, 97%, 98%, 99%, 99.5% or more) to SEQ ID NO: 100; and/or (b) comprising a fragment of at least ‘n’ consecutive amino acids of SEQ ID NO: 100, wherein ‘n’ is 7 or more (e.g. 8, 10, 12, 14, 16, 18, 20, 25, 30, 35, 40, 50, 60, 70, 80, 90, 100, 150, 200, 250 or more). These IC66 proteins include variants of SEQ ID NO: 100. Preferred fragments of (b) comprise an epitope from SEQ ID NO: 100. Other preferred fragments lack one or more amino acids (e.g. 1, 2, 3, 4, 5, 6, 7, 8, 9, 10, 15, 20, 25 or more) from the C-terminus and/or one or more amino acids (e.g. 1, 2, 3, 4, 5, 6, 7, 8, 9, 10, 15, 20, 25 or more) from the N-terminus of SEQ ID NO: 100 while retaining at least one epitope of SEQ ID NO: 100. Other fragments omit one or more protein domains.

[0411] IC67

[0412] IC67 is a Subtilisin-like serine protease. For reference purposes, the amino acid sequence of full length IC67 is SEQ ID NO: 101 herein. In the R6 genome IC67 is spr1771 [84]. The use of IC67 for immunisation is reported in reference 10 (SEQ ID NO: 222 therein).

[0413] Preferred IC67 polypeptides for use with the invention comprise an amino acid sequence: (a) having 50% or more identity (e.g. 60%, 65%, 70%, 75%, 80%, 85%, 90%, 91%, 92%, 93%, 94%, 95%, 96%, 97%, 98%, 99%, 99.5% or more) to SEQ ID NO: 101; and/or (b) comprising a fragment of at least ‘n’ consecutive amino acids of SEQ ID NO: 101, wherein ‘n’ is 7 or more (e.g. 8, 10, 12, 14, 16, 18, 20, 25, 30, 35, 40, 50, 60, 70, 80, 90, 100, 150, 200, 250 or more). These IC67 proteins include variants of SEQ ID NO: 101. Preferred fragments of (b) comprise an epitope from SEQ ID NO: 101. Other preferred fragments lack one or more amino acids (e.g. 1, 2, 3, 4, 5, 6, 7, 8, 9, 10, 15, 20, 25 or more) from the C-terminus and/or one or more amino acids (e.g. 1, 2, 3, 4, 5, 6, 7, 8, 9, 10, 15, 20, 25 or more) from the N-terminus of SEQ ID NO: 101 while retaining at least one epitope of SEQ ID NO: 101. Other fragments omit one or more protein domains. Immunogenic fragments of IC67 are identified in table 1 of reference 10.

[0414] IC68

[0415] IC68 is a Cmp-binding-factor 1. For reference purposes, the amino acid sequence of full length IC68 is SEQ ID NO: 102 herein. In the R6 genome IC68 is spr1794 [84]. The use of IC68 for immunisation is reported in reference 10 (SEQ ID NO: 223 therein).

[0416] Preferred IC68 polypeptides for use with the invention comprise an amino acid sequence: (a) having 50% or more identity (e.g. 60%, 65%, 70%, 75%, 80%, 85%, 90%, 91%, 92%, 93%, 94%, 95%, 96%, 97%, 98%, 99%, 99.5% or more) to SEQ ID NO: 102; and/or (b) comprising a fragment of at least ‘n’ consecutive amino acids of SEQ ID NO: 102, wherein ‘n’ is 7 or more (e.g. 8, 10, 12, 14, 16, 18, 20, 25, 30, 35, 40, 50, 60, 70, 80, 90, 100, 150, 200, 250 or more). These IC68 proteins include variants of SEQ ID NO: 102. Preferred fragments of (b) comprise an epitope from SEQ ID NO: 102. Other preferred fragments lack one or more amino acids (e.g. 1, 2, 3, 4, 5, 6, 7, 8, 9, 10, 15, 20, 25 or more) from the C-terminus and/or one or more amino acids (e.g. 1, 2, 3, 4, 5, 6, 7, 8, 9, 10, 15, 20, 25 or more) from the N-terminus of SEQ ID NO: 102 while retaining at least one epitope of SEQ ID NO: 102. Other fragments omit one or more protein domains. Immunogenic fragments of IC68 are identified in table 1 of reference 10.

[0417] IC69

[0418] IC69 is annotated in reference 10 as cell wall surface anchor family protein. For reference purposes, the amino acid sequence of full length IC69 is SEQ ID NO: 103 herein. In the R6 genome IC69 is spr1806 [84]. The use of IC69 for immunisation is reported in reference 10 (SEQ ID NO: 224 therein).

[0419] Preferred IC69 polypeptides for use with the invention comprise an amino acid sequence: (a) having 50% or more identity (e.g. 60%, 65%, 70%, 75%, 80%, 85%, 90%, 91%, 92%, 93%, 94%, 95%, 96%, 97%, 98%, 99%, 99.5% or more) to SEQ ID NO: 103; and/or (b) comprising a fragment of at least ‘n’ consecutive amino acids of SEQ ID NO: 103, wherein ‘n’ is 7 or more (e.g. 8, 10, 12, 14, 16, 18, 20, 25, 30, 35, 40, 50, 60, 70, 80, 90, 100, 150, 200, 250 or more). These IC69 proteins include variants of SEQ ID NO: 103. Preferred fragments of (b) comprise an epitope from SEQ ID NO: 103. Other preferred fragments lack one or more amino acids (e.g. 1, 2, 3, 4, 5, 6, 7, 8, 9, 10, 15, 20, 25 or more) from the C-terminus and/or one or more amino acids (e.g. 1, 2, 3, 4, 5, 6, 7, 8, 9, 10, 15, 20, 25 or more) from the N-terminus of SEQ ID NO: 103 while retaining at least one epitope of SEQ ID NO: 103. Other fragments omit one or more protein domains. Immunogenic fragments of IC69 are identified in table 1 of reference 10.

[0420] IC70

[0421] IC70 is a Catabolite control protein A. For reference purposes, the amino acid sequence of full length IC70 is SEQ ID NO: 104 herein. In the R6 genome IC70 is spr1813 [84]. The use of IC70 for immunisation is reported in reference 10 (SEQ ID NO: 225 therein).

[0422] Preferred IC70 polypeptides for use with the invention comprise an amino acid sequence: (a) having 50% or more identity (e.g. 60%, 65%, 70%, 75%, 80%, 85%, 90%, 91%, 92%, 93%, 94%, 95%, 96%, 97%, 98%, 99%, 99.5% or more) to SEQ ID NO: 104; and/or (b) comprising a fragment of at least ‘n’ consecutive amino acids of SEQ ID NO: 104, wherein ‘n’ is 7 or more (e.g. 8, 10, 12, 14, 16, 18, 20, 25, 30, 35, 40, 50, 60, 70, 80, 90, 100, 150, 200, 250 or more). These IC70 proteins include variants of SEQ ID NO: 104. Preferred fragments of (b) comprise an epitope from SEQ ID NO: 104. Other preferred fragments lack one or more amino acids (e.g. 1, 2, 3, 4, 5, 6, 7, 8, 9, 10, 15, 20, 25 or more) from the C-terminus and/or one or more amino acids (e.g. 1, 2, 3, 4, 5, 6, 7, 8, 9, 10, 15, 20, 25 or more) from the N-terminus of SEQ ID NO: 104 while retaining at least one epitope of SEQ ID NO: 104. Other fragments omit one or more protein domains. Immunogenic fragments of IC70 are identified in table 1 of reference 10.

[0423] IC71

[0424] IC71 is a Beta-glucosidase. For reference purposes, the amino acid sequence of full length IC71 is SEQ ID NO: 105 herein. In the R6 genome IC71 is spr1833 [84]. The use of IC71 for immunisation is reported in reference 10 (SEQ ID NO: 226 therein).

[0425] Preferred IC71 polypeptides for use with the invention comprise an amino acid sequence: (a) having 50% or more identity (e.g. 60%, 65%, 70%, 75%, 80%, 85%, 90%, 91%, 92%, 93%, 94%, 95%, 96%, 97%, 98%, 99%, 99.5% or more) to SEQ ID NO: 105; and/or (b) comprising a fragment of at least ‘n’ consecutive amino acids of SEQ ID NO: 105, wherein ‘n’ is 7 or more (e.g. 8, 10, 12, 14, 16, 18, 20, 25, 30, 35, 40, 50, 60, 70, 80, 90, 100, 150, 200, 250 or more). These IC71 proteins include variants of SEQ ID NO: 105. Preferred fragments of (b) comprise an epitope from SEQ ID NO: 105. Other preferred fragments lack one or more amino acids (e.g. 1, 2, 3, 4, 5, 6, 7, 8, 9, 10, 15, 20, 25 or more) from the C-terminus and/or one or more amino acids (e.g. 1, 2, 3, 4, 5, 6, 7, 8, 9, 10, 15, 20, 25 or more) from the N-terminus of SEQ ID NO: 105 while retaining at least one epitope of SEQ ID NO: 105. Other fragments omit one or more protein domains. Immunogenic fragments of IC71 are identified in table 1 of reference 10.

[0426] IC72

[0427] IC72 is annotated in reference 10 as a hypothetical protein. For reference purposes, the amino acid sequence of full length IC72 is SEQ ID NO: 106 herein. In the R6 genome IC72 is spr1838 [84]. The use of IC72 for immunisation is reported in reference 10 (SEQ ID NO: 227 therein).

[0428] Preferred IC72 polypeptides for use with the invention comprise an amino acid sequence: (a) having 50% or more identity (e.g. 60%, 65%, 70%, 75%, 80%, 85%, 90%, 91%, 92%, 93%, 94%, 95%, 96%, 97%, 98%, 99%, 99.5% or more) to SEQ ID NO: 106; and/or (b) comprising a fragment of at least ‘n’ consecutive amino acids of SEQ ID NO: 106, wherein ‘n’ is 7 or more (e.g. 8, 10, 12, 14, 16, 18, 20, 25, 30, 35, 40, 50, 60, 70, 80, 90, 100, 150, 200, 250 or more). These IC72 proteins include variants of SEQ ID NO: 106. Preferred fragments of (b) comprise an epitope from SEQ ID NO: 106. Other preferred fragments lack one or more amino acids (e.g. 1, 2, 3, 4, 5, 6, 7, 8, 9, 10, 15, 20, 25 or more) from the C-terminus and/or one or more amino acids (e.g. 1, 2, 3, 4, 5, 6, 7, 8, 9, 10, 15, 20, 25 or more) from the N-terminus of SEQ ID NO: 106 while retaining at least one epitope of SEQ ID NO: 106. Other fragments omit one or more protein domains. Immunogenic fragments of IC72 are identified in table 1 of reference 10.

[0429] IC73

[0430] IC73 is annotated in reference 10 as a hypothetical protein. For reference purposes, the amino acid sequence of full length IC73 is SEQ ID NO: 107 herein. In the R6 genome IC73 is spr1850 [84]. The use of IC73 for immunisation is reported in reference 10 (SEQ ID NO: 228 therein).

[0431] Preferred IC73 polypeptides for use with the invention comprise an amino acid sequence: (a) having 50% or more identity (e.g. 60%, 65%, 70%, 75%, 80%, 85%, 90%, 91%, 92%, 93%, 94%, 95%, 96%, 97%, 98%, 99%, 99.5% or more) to SEQ ID NO: 107; and/or (b) comprising a fragment of at least ‘n’ consecutive amino acids of SEQ ID NO: 107, wherein ‘n’ is 7 or more (e.g. 8, 10, 12, 14, 16, 18, 20, 25, 30, 35, 40, 50, 60, 70, 80, 90, 100, 150, 200, 250 or more). These IC73 proteins include variants of SEQ ID NO: 107. Preferred fragments of (b) comprise an epitope from SEQ ID NO: 107. Other preferred fragments lack one or more amino acids (e.g. 1, 2, 3, 4, 5, 6, 7, 8, 9, 10, 15, 20, 25 or more) from the C-terminus and/or one or more amino acids (e.g. 1, 2, 3, 4, 5, 6, 7, 8, 9, 10, 15, 20, 25 or more) from the N-terminus of SEQ ID NO: 107 while retaining at least one epitope of SEQ ID NO: 107. Other fragments omit one or more protein domains. Immunogenic fragments of IC73 are identified in table 1 of reference 10.

[0432] IC74

[0433] IC74 is annotated in reference 10 as a hypothetical protein. For reference purposes, the amino acid sequence of full length IC74 is SEQ ID NO: 108 herein. In the R6 genome IC74 is spr1859 [84]. The use of IC74 for immunisation is reported in reference 10 (SEQ ID NO: 229 therein).

[0434] Preferred IC74 polypeptides for use with the invention comprise an amino acid sequence: (a) having 50% or more identity (e.g. 60%, 65%, 70%, 75%, 80%, 85%, 90%, 91%, 92%, 93%, 94%, 95%, 96%, 97%, 98%, 99%, 99.5% or more) to SEQ ID NO: 108; and/or (b) comprising a fragment of at least ‘n’ consecutive amino acids of SEQ ID NO: 108, wherein ‘n’ is 7 or more (e.g. 8, 10, 12, 14, 16, 18, 20, 25, 30, 35, 40, 50, 60, 70, 80, 90, 100, 150, 200, 250 or more). These IC74 proteins include variants of SEQ ID NO: 108. Preferred fragments of (b) comprise an epitope from SEQ ID NO: 108. Other preferred fragments lack one or more amino acids (e.g. 1, 2, 3, 4, 5, 6, 7, 8, 9, 10, 15, 20, 25 or more) from the C-terminus and/or one or more amino acids (e.g. 1, 2, 3, 4, 5, 6, 7, 8, 9, 10, 15, 20, 25 or more) from the N-terminus of SEQ ID NO: 108 while retaining at least one epitope of SEQ ID NO: 108. Other fragments omit one or more protein domains. Immunogenic fragments of IC74 are identified in table 1 of reference 10.

[0435] IC75

[0436] IC75 is a Competence protein. For reference purposes, the amino acid sequence of full length IC75 is SEQ ID NO: 109 herein. In the R6 genome IC75 is spr1862 [84]. The use of IC75 for immunisation is reported in reference 10 (SEQ ID NO: 230 therein).

[0437] Preferred IC75 polypeptides for use with the invention comprise an amino acid sequence: (a) having 50% or more identity (e.g. 60%, 65%, 70%, 75%, 80%, 85%, 90%, 91%, 92%, 93%, 94%, 95%, 96%, 97%, 98%, 99%, 99.5% or more) to SEQ ID NO: 109; and/or (b) comprising a fragment of at least ‘n’ consecutive amino acids of SEQ ID NO: 109, wherein ‘n’ is 7 or more (e.g. 8, 10, 12, 14, 16, 18, 20, 25, 30, 35, 40, 50, 60, 70, 80, 90, 100, 150, 200, 250 or more). These IC75 proteins include variants of SEQ ID NO: 109. Preferred fragments of (b) comprise an epitope from SEQ ID NO: 109. Other preferred fragments lack one or more amino acids (e.g. 1, 2, 3, 4, 5, 6, 7, 8, 9, 10, 15, 20, 25 or more) from the C-terminus and/or one or more amino acids (e.g. 1, 2, 3, 4, 5, 6, 7, 8, 9, 10, 15, 20, 25 or more) from the N-terminus of SEQ ID NO: 109 while retaining at least one epitope of SEQ ID NO: 109. Other fragments omit one or more protein domains. Immunogenic fragments of IC75 are identified in table 1 of reference 10.

[0438] IC76

[0439] IC76 is a UTP-glucose-1-phosphate uridylyltransferase. For reference purposes, the amino acid sequence of full length IC76 is SEQ ID NO: 110 herein. In the R6 genome IC76 is spr1903 [84]. The use of IC76 for immunisation is reported in reference 10 (SEQ ID NO: 231 therein).

[0440] Preferred IC76 polypeptides for use with the invention comprise an amino acid sequence: (a) having 50% or more identity (e.g. 60%, 65%, 70%, 75%, 80%, 85%, 90%, 91%, 92%, 93%, 94%, 95%, 96%, 97%, 98%, 99%, 99.5% or more) to SEQ ID NO: 110; and/or (b) comprising a fragment of at least ‘n’ consecutive amino acids of SEQ ID NO: 110, wherein ‘n’ is 7 or more (e.g. 8, 10, 12, 14, 16, 18, 20, 25, 30, 35, 40, 50, 60, 70, 80, 90, 100, 150, 200, 250 or more). These IC76 proteins include variants of SEQ ID NO: 110. Preferred fragments of (b) comprise an epitope from SEQ ID NO: 110. Other preferred fragments lack one or more amino acids (e.g. 1, 2, 3, 4, 5, 6, 7, 8, 9, 10, 15, 20, 25 or more) from the C-terminus and/or one or more amino acids (e.g. 1, 2, 3, 4, 5, 6, 7, 8, 9, 10, 15, 20, 25 or more) from the N-terminus of SEQ ID NO: 110 while retaining at least one epitope of SEQ ID NO: 110. Other fragments omit one or more protein domains. Immunogenic fragments of IC76 are identified in table 1 of reference 10.

[0441] IC77

[0442] IC77 is a Penicillin-binding protein 1b. For reference purposes, the amino acid sequence of full length IC77 is SEQ ID NO: 111 herein. In the R6 genome IC77 is spr1909 [84]. The use of IC77 for immunisation is reported in reference 10 (SEQ ID NO: 232 therein).

[0443] Preferred IC77 polypeptides for use with the invention comprise an amino acid sequence: (a) having 50% or more identity (e.g. 60%, 65%, 70%, 75%, 80%, 85%, 90%, 91%, 92%, 93%, 94%, 95%, 96%, 97%, 98%, 99%, 99.5% or more) to SEQ ID NO: 111; and/or (b) comprising a fragment of at least ‘n’ consecutive amino acids of SEQ ID NO: 111, wherein ‘n’ is 7 or more (e.g. 8, 10, 12, 14, 16, 18, 20, 25, 30, 35, 40, 50, 60, 70, 80, 90, 100, 150, 200, 250 or more). These IC77 proteins include variants of SEQ ID NO: 111. Preferred fragments of (b) comprise an epitope from SEQ ID NO: 111. Other preferred fragments lack one or more amino acids (e.g. 1, 2, 3, 4, 5, 6, 7, 8, 9, 10, 15, 20, 25 or more) from the C-terminus and/or one or more amino acids (e.g. 1, 2, 3, 4, 5, 6, 7, 8, 9, 10, 15, 20, 25 or more) from the N-terminus of SEQ ID NO: 111 while retaining at least one epitope of SEQ ID NO: 111. Other fragments omit one or more protein domains. Immunogenic fragments of IC77 are identified in table 1 of reference 10.

[0444] IC78

[0445] IC78 is a ABC transporter substrate-binding protein-maltose/maltodextrin. For reference purposes, the amino acid sequence of full length IC78 is SEQ ID NO: 112 herein. In the R6 genome IC78 is spr1918 [84]. The use of IC78 for immunisation is reported in reference 10 (SEQ ID NO: 233 therein).

[0446] Preferred IC78 polypeptides for use with the invention comprise an amino acid sequence: (a) having 50% or more identity (e.g. 60%, 65%, 70%, 75%, 80%, 85%, 90%, 91%, 92%, 93%, 94%, 95%, 96%, 97%, 98%, 99%, 99.5% or more) to SEQ ID NO: 112; and/or (b) comprising a fragment of at least ‘n’ consecutive amino acids of SEQ ID NO: 112, wherein ‘n’ is 7 or more (e.g. 8, 10, 12, 14, 16, 18, 20, 25, 30, 35, 40, 50, 60, 70, 80, 90, 100, 150, 200, 250 or more). These IC78 proteins include variants of SEQ ID NO: 112. Preferred fragments of (b) comprise an epitope from SEQ ID NO: 112. Other preferred fragments lack one or more amino acids (e.g. 1, 2, 3, 4, 5, 6, 7, 8, 9, 10, 15, 20, 25 or more) from the C-terminus and/or one or more amino acids (e.g. 1, 2, 3, 4, 5, 6, 7, 8, 9, 10, 15, 20, 25 or more) from the N-terminus of SEQ ID NO: 112 while retaining at least one epitope of SEQ ID NO: 112. Other fragments omit one or more protein domains. Immunogenic fragments of IC78 are identified in table 1 of reference 10.

[0447] IC79

[0448] IC79 is annotated in reference 10 as a hypothetical protein. For reference purposes, the amino acid sequence of full length IC79 is SEQ ID NO: 113 herein. In the R6 genome IC79 is spr2120 [84]. The use of IC79 for immunisation is reported in reference 10 (SEQ ID NO: 234 therein).

[0449] Preferred IC79 polypeptides for use with the invention comprise an amino acid sequence: (a) having 50% or more identity (e.g. 60%, 65%, 70%, 75%, 80%, 85%, 90%, 91%, 92%, 93%, 94%, 95%, 96%, 97%, 98%, 99%, 99.5% or more) to SEQ ID NO: 113; and/or (b) comprising a fragment of at least ‘n’ consecutive amino acids of SEQ ID NO: 113, wherein ‘n’ is 7 or more (e.g. 8, 10, 12, 14, 16, 18, 20, 25, 30, 35, 40, 50, 60, 70, 80, 90, 100, 150, 200, 250 or more). These IC79 proteins include variants of SEQ ID NO: 113. Preferred fragments of (b) comprise an epitope from SEQ ID NO: 113. Other preferred fragments lack one or more amino acids (e.g. 1, 2, 3, 4, 5, 6, 7, 8, 9, 10, 15, 20, 25 or more) from the C-terminus and/or one or more amino acids (e.g. 1, 2, 3, 4, 5, 6, 7, 8, 9, 10, 15, 20, 25 or more) from the N-terminus of SEQ ID NO: 113 while retaining at least one epitope of SEQ ID NO: 113. Other fragments omit one or more protein domains. Immunogenic fragments of IC79 are identified in table 1 of reference 10.

[0450] IC80

[0451] IC80 is a Putative transketolase n-terminal section. For reference purposes, the amino acid sequence of full length IC80 is SEQ ID NO: 114 herein. In the R6 genome IC80 is spr1937 [84]. The use of IC80 for immunisation is reported in reference 10 (SEQ ID NO: 235 therein).

[0452] Preferred IC80 polypeptides for use with the invention comprise an amino acid sequence: (a) having 50% or more identity (e.g. 60%, 65%, 70%, 75%, 80%, 85%, 90%, 91%, 92%, 93%, 94%, 95%, 96%, 97%, 98%, 99%, 99.5% or more) to SEQ ID NO: 114; and/or (b) comprising a fragment of at least ‘n’ consecutive amino acids of SEQ ID NO: 114, wherein ‘n’ is 7 or more (e.g. 8, 10, 12, 14, 16, 18, 20, 25, 30, 35, 40, 50, 60, 70, 80, 90, 100, 150, 200, 250 or more). These IC80 proteins include variants of SEQ ID NO: 114. Preferred fragments of (b) comprise an epitope from SEQ ID NO: 114. Other preferred fragments lack one or more amino acids (e.g. 1, 2, 3, 4, 5, 6, 7, 8, 9, 10, 15, 20, 25 or more) from the C-terminus and/or one or more amino acids (e.g. 1, 2, 3, 4, 5, 6, 7, 8, 9, 10, 15, 20, 25 or more) from the N-terminus of SEQ ID NO: 114 while retaining at least one epitope of SEQ ID NO: 114. Other fragments omit one or more protein domains. Immunogenic fragments of IC80 are identified in table 1 of reference 10.

[0453] IC81

[0454] IC81 is a Choline-binding protein. For reference purposes, the amino acid sequence of full length IC81 is SEQ ID NO: 115 herein. Its C-terminus is related to IC3. The use of IC81 for immunisation is reported in reference 10 (SEQ ID NO: 236 therein).

[0455] Preferred IC81 polypeptides for use with the invention comprise an amino acid sequence: (a) having 50% or more identity (e.g. 60%, 65%, 70%, 75%, 80%, 85%, 90%, 91%, 92%, 93%, 94%, 95%, 96%, 97%, 98%, 99%, 99.5% or more) to SEQ ID NO: 115; and/or (b) comprising a fragment of at least ‘n’ consecutive amino acids of SEQ ID NO: 115, wherein ‘n’ is 7 or more (e.g. 8, 10, 12, 14, 16, 18, 20, 25, 30, 35, 40, 50, 60, 70, 80, 90, 100, 150, 200, 250 or more). These IC81 proteins include variants of SEQ ID NO: 115. Preferred fragments of (b) comprise an epitope from SEQ ID NO: 115. Other preferred fragments lack one or more amino acids (e.g. 1, 2, 3, 4, 5, 6, 7, 8, 9, 10, 15, 20, 25 or more) from the C-terminus and/or one or more amino acids (e.g. 1, 2, 3, 4, 5, 6, 7, 8, 9, 10, 15, 20, 25 or more) from the N-terminus of SEQ ID NO: 115 while retaining at least one epitope of SEQ ID NO: 115. Other fragments omit one or more protein domains. Immunogenic fragments of IC81 are identified in table 1 of reference 10.

[0456] IC82

[0457] IC82 is a glycosyl hydrolase-related protein. For reference purposes, the amino acid sequence of full length IC82 is SEQ ID NO: 116 herein. In the R6 genome IC82 is spr2141 [84]. The use of IC82 for immunisation is reported in reference 10 (SEQ ID NO: 237 therein).

[0458] Preferred IC82 polypeptides for use with the invention comprise an amino acid sequence: (a) having 50% or more identity (e.g. 60%, 65%, 70%, 75%, 80%, 85%, 90%, 91%, 92%, 93%, 94%, 95%, 96%, 97%, 98%, 99%, 99.5% or more) to SEQ ID NO: 116; and/or (b) comprising a fragment of at least ‘n’ consecutive amino acids of SEQ ID NO: 116, wherein ‘n’ is 7 or more (e.g. 8, 10, 12, 14, 16, 18, 20, 25, 30, 35, 40, 50, 60, 70, 80, 90, 100, 150, 200, 250 or more). These IC82 proteins include variants of SEQ ID NO: 116. Preferred fragments of (b) comprise an epitope from SEQ ID NO: 116. Other preferred fragments lack one or more amino acids (e.g. 1, 2, 3, 4, 5, 6, 7, 8, 9, 10, 15, 20, 25 or more) from the C-terminus and/or one or more amino acids (e.g. 1, 2, 3, 4, 5, 6, 7, 8, 9, 10, 15, 20, 25 or more) from the N-terminus of SEQ ID NO: 116 while retaining at least one epitope of SEQ ID NO: 116. Other fragments omit one or more protein domains. Immunogenic fragments of IC82 are identified in table 1 of reference 10.

[0459] IC83

[0460] IC83 is annotated in reference 10 as a hypothetical protein. For reference purposes, the amino acid sequence of full length IC83 is SEQ ID NO: 117 herein. In the R6 genome IC83 is spr1983 [84]. The use of IC83 for immunisation is reported in reference 10 (SEQ ID NO: 238 therein).

[0461] Preferred IC83 polypeptides for use with the invention comprise an amino acid sequence: (a) having 50% or more identity (e.g. 60%, 65%, 70%, 75%, 80%, 85%, 90%, 91%, 92%, 93%, 94%, 95%, 96%, 97%, 98%, 99%, 99.5% or more) to SEQ ID NO: 117; and/or (b) comprising a fragment of at least ‘n’ consecutive amino acids of SEQ ID NO: 117, wherein ‘n’ is 7 or more (e.g. 8, 10, 12, 14, 16, 18, 20, 25, 30, 35, 40, 50, 60, 70, 80, 90, 100, 150, 200, 250 or more). These IC83 proteins include variants of SEQ ID NO: 117. Preferred fragments of (b) comprise an epitope from SEQ ID NO: 117. Other preferred fragments lack one or more amino acids (e.g. 1, 2, 3, 4, 5, 6, 7, 8, 9, 10, 15, 20, 25 or more) from the C-terminus and/or one or more amino acids (e.g. 1, 2, 3, 4, 5, 6, 7, 8, 9, 10, 15, 20, 25 or more) from the N-terminus of SEQ ID NO: 117 while retaining at least one epitope of SEQ ID NO: 117. Other fragments omit one or more protein domains. Immunogenic fragments of IC83 are identified in table 1 of reference 10.

[0462] IC84

[0463] IC84 is a Class III stress response-related ATPase. For reference purposes, the amino acid sequence of full length IC84 is SEQ ID NO: 118 herein. In the R6 genome IC84 is spr2000 [84]. The use of IC84 for immunisation is reported in reference 10 (SEQ ID NO: 240 therein).

[0464] Preferred IC84 polypeptides for use with the invention comprise an amino acid sequence: (a) having 50% or more identity (e.g. 60%, 65%, 70%, 75%, 80%, 85%, 90%, 91%, 92%, 93%, 94%, 95%, 96%, 97%, 98%, 99%, 99.5% or more) to SEQ ID NO: 118; and/or (b) comprising a fragment of at least ‘n’ consecutive amino acids of SEQ ID NO: 118, wherein ‘n’ is 7 or more (e.g. 8, 10, 12, 14, 16, 18, 20, 25, 30, 35, 40, 50, 60, 70, 80, 90, 100, 150, 200, 250 or more). These IC84 proteins include variants of SEQ ID NO: 118. Preferred fragments of (b) comprise an epitope from SEQ ID NO: 118. Other preferred fragments lack one or more amino acids (e.g. 1, 2, 3, 4, 5, 6, 7, 8, 9, 10, 15, 20, 25 or more) from the C-terminus and/or one or more amino acids (e.g. 1, 2, 3, 4, 5, 6, 7, 8, 9, 10, 15, 20, 25 or more) from the N-terminus of SEQ ID NO: 118 while retaining at least one epitope of SEQ ID NO: 118. Other fragments omit one or more protein domains. Immunogenic fragments of IC84 are identified in table 1 of reference 10.

[0465] IC85

[0466] IC85 is a variant of SEQ ID NO: 23, mentioned above (SEQ ID NO: 119). Useful IC85 polypeptides for use with the invention comprise an amino acid sequence: (a) having 50% or more identity (e.g. 60%, 65%, 70%, 75%, 80%, 85%, 90%, 91%, 92%, 93%, 94%, 95%, 96%, 97%, 98%, 99%, 99.5% or more) to SEQ ID NO: 119; and/or (b) comprising a fragment of at least ‘n’ consecutive amino acids of SEQ ID NO: 119, wherein ‘n’ is 7 or more (e.g. 8, 10, 12, 14, 16, 18, 20, 25, 30, 35, 40, 50, 60, 70, 80, 90, 100, 150, 200, 250 or more). These IC85 proteins include variants of SEQ ID NO: 119. Preferred fragments of (b) comprise an epitope from SEQ ID NO: 119. Other preferred fragments lack one or more amino acids (e.g. 1, 2, 3, 4, 5, 6, 7, 8, 9, 10, 15, 20, 25 or more) from the C-terminus and/or one or more amino acids (e.g. 1, 2, 3, 4, 5, 6, 7, 8, 9, 10, 15, 20, 25 or more) from the N-terminus of SEQ ID NO: 119 while retaining at least one epitope of SEQ ID NO: 119. Other fragments omit one or more protein domains.

[0467] IC86

[0468] IC86 is a 50S ribosomal protein L9. For reference purposes, the amino acid sequence of full length IC86 is SEQ ID NO: 120 herein. In the R6 genome IC86 is spr2009 [84]. The use of IC86 for immunisation is reported in reference 10 (SEQ ID NO: 242 therein).

[0469] Preferred IC86 polypeptides for use with the invention comprise an amino acid sequence: (a) having 50% or more identity (e.g. 60%, 65%, 70%, 75%, 80%, 85%, 90%, 91%, 92%, 93%, 94%, 95%, 96%, 97%, 98%, 99%, 99.5% or more) to SEQ ID NO: 120; and/or (b) comprising a fragment of at least ‘n’ consecutive amino acids of SEQ ID NO: 120, wherein ‘n’ is 7 or more (e.g. 8, 10, 12, 14, 16, 18, 20, 25, 30, 35, 40, 50, 60, 70, 80, 90, 100, 150, 200, 250 or more). These IC86 proteins include variants of SEQ ID NO: 120. Preferred fragments of (b) comprise an epitope from SEQ ID NO: 120. Other preferred fragments lack one or more amino acids (e.g. 1, 2, 3, 4, 5, 6, 7, 8, 9, 10, 15, 20, 25 or more) from the C-terminus and/or one or more amino acids (e.g. 1, 2, 3, 4, 5, 6, 7, 8, 9, 10, 15, 20, 25 or more) from the N-terminus of SEQ ID NO: 120 while retaining at least one epitope of SEQ ID NO: 120. Other fragments omit one or more protein domains. Immunogenic fragments of IC86 are identified in table 1 of reference 10.

[0470] IC87

[0471] IC87 is annotated in reference 10 as a hypothetical protein. For reference purposes, the amino acid sequence of full length IC87 is SEQ ID NO: 166 herein. In the R6 genome IC87 is spr0987 [84]. The use of IC87 for immunisation is reported in reference 10 (SEQ ID NO: 288 therein).

[0472] Preferred IC87 polypeptides for use with the invention comprise an amino acid sequence: (a) having 50% or more identity (e.g. 60%, 65%, 70%, 75%, 80%, 85%, 90%, 91%, 92%, 93%, 94%, 95%, 96%, 97%, 98%, 99%, 99.5% or more) to SEQ ID NO: 166; and/or (b) comprising a fragment of at least ‘n’ consecutive amino acids of SEQ ID NO: 166, wherein ‘n’ is 7 or more (e.g. 8, 10, 12, 14, 16, 18, 20, 25, 30, 35, 40, 50, 60, 70, 80, 90, 100, 150, 200, 250 or more). These IC87 proteins include variants of SEQ ID NO: 166. Preferred fragments of (b) comprise an epitope from SEQ ID NO: 166. Other preferred fragments lack one or more amino acids (e.g. 1, 2, 3, 4, 5, 6, 7, 8, 9, 10, 15, 20, 25 or more) from the C-terminus and/or one or more amino acids (e.g. 1, 2, 3, 4, 5, 6, 7, 8, 9, 10, 15, 20, 25 or more) from the N-terminus of SEQ ID NO: 166 while retaining at least one epitope of SEQ ID NO: 166. Other fragments omit one or more protein domains. Immunogenic fragments of IC87 are identified in table 1 of reference 10.

[0473] IC88

[0474] IC88 is a Choline binding protein. For reference purposes, the amino acid sequence of full length IC88 is SEQ ID NO: 122 herein. In the R6 genome IC88 is spr1274 [84]. The use of IC88 for immunisation is reported in reference 10 (SEQ ID NO: 244 therein).

[0475] Preferred IC88 polypeptides for use with the invention comprise an amino acid sequence: (a) having 50% or more identity (e.g. 60%, 65%, 70%, 75%, 80%, 85%, 90%, 91%, 92%, 93%, 94%, 95%, 96%, 97%, 98%, 99%, 99.5% or more) to SEQ ID NO: 122; and/or (b) comprising a fragment of at least ‘n’ consecutive amino acids of SEQ ID NO: 122, wherein ‘n’ is 7 or more (e.g. 8, 10, 12, 14, 16, 18, 20, 25, 30, 35, 40, 50, 60, 70, 80, 90, 100, 150, 200, 250 or more). These IC88 proteins include variants of SEQ ID NO: 122. Preferred fragments of (b) comprise an epitope from SEQ ID NO: 122. Other preferred fragments lack one or more amino acids (e.g. 1, 2, 3, 4, 5, 6, 7, 8, 9, 10, 15, 20, 25 or more) from the C-terminus and/or one or more amino acids (e.g. 1, 2, 3, 4, 5, 6, 7, 8, 9, 10, 15, 20, 25 or more) from the N-terminus of SEQ ID NO: 122 while retaining at least one epitope of SEQ ID NO: 122. Other fragments omit one or more protein domains. Immunogenic fragments of IC88 are identified in table 1 of reference 10.

[0476] IC89

[0477] IC89 is annotated in reference 10 as a hypothetical protein. For reference purposes, the amino acid sequence of full length IC89 is SEQ ID NO: 123 herein. The use of IC89 for immunisation is reported in reference 10 (SEQ ID NO: 245 therein).

[0478] Preferred IC89 polypeptides for use with the invention comprise an amino acid sequence: (a) having 50% or more identity (e.g. 60%, 65%, 70%, 75%, 80%, 85%, 90%, 91%, 92%, 93%, 94%, 95%, 96%, 97%, 98%, 99%, 99.5% or more) to SEQ ID NO: 123; and/or (b) comprising a fragment of at least ‘n’ consecutive amino acids of SEQ ID NO: 123, wherein ‘n’ is 7 or more (e.g. 8, 10, 12, 14, 16, 18, 20, 25, 30, 35, 40, 50, 60, 70, 80, 90, 100, 150, 200, 250 or more). These IC89 proteins include variants of SEQ ID NO: 123. Preferred fragments of (b) comprise an epitope from SEQ ID NO: 123. Other preferred fragments lack one or more amino acids (e.g. 1, 2, 3, 4, 5, 6, 7, 8, 9, 10, 15, 20, 25 or more) from the C-terminus and/or one or more amino acids (e.g. 1, 2, 3, 4, 5, 6, 7, 8, 9, 10, 15, 20, 25 or more) from the N-terminus of SEQ ID NO: 123 while retaining at least one epitope of SEQ ID NO: 123. Other fragments omit one or more protein domains. Immunogenic fragments of IC89 are identified in table 1 of reference 10.

[0479] IC90

[0480] IC90 is annotated in reference 10 as a hypothetical protein. For reference purposes, the amino acid sequence of full length IC90 is SEQ ID NO: 124 herein. The use of IC90 for immunisation is reported in reference 10 (SEQ ID NO: 246 therein).

[0481] Preferred IC90 polypeptides for use with the invention comprise an amino acid sequence: (a) having 50% or more identity (e.g. 60%, 65%, 70%, 75%, 80%, 85%, 90%, 91%, 92%, 93%, 94%, 95%, 96%, 97%, 98%, 99%, 99.5% or more) to SEQ ID NO: 124; and/or (b) comprising a fragment of at least ‘n’ consecutive amino acids of SEQ ID NO: 124, wherein ‘n’ is 7 or more (e.g. 8, 10, 12, 14, 16, 18, 20, 25, 30, 35, 40, 50, 60, 70, 80, 90, 100, 150, 200, 250 or more). These IC90 proteins include variants of SEQ ID NO: 124. Preferred fragments of (b) comprise an epitope from SEQ ID NO: 124. Other preferred fragments lack one or more amino acids (e.g. 1, 2, 3, 4, 5, 6, 7, 8, 9, 10, 15, 20, 25 or more) from the C-terminus and/or one or more amino acids (e.g. 1, 2, 3, 4, 5, 6, 7, 8, 9, 10, 15, 20, 25 or more) from the N-terminus of SEQ ID NO: 124 while retaining at least one epitope of SEQ ID NO: 124. Other fragments omit one or more protein domains. Immunogenic fragments of IC90 are identified in table 1 of reference 10.

[0482] IC91

[0483] IC91 is annotated in reference 10 as a hypothetical protein. For reference purposes, the amino acid sequence of full length IC91 is SEQ ID NO: 125 herein. In the R6 genome IC91 is spr0415 [84]. The use of IC91 for immunisation is reported in reference 10 (SEQ ID NO: 247 therein).

[0484] Preferred IC91 polypeptides for use with the invention comprise an amino acid sequence: (a) having 50% or more identity (e.g. 60%, 65%, 70%, 75%, 80%, 85%, 90%, 91%, 92%, 93%, 94%, 95%, 96%, 97%, 98%, 99%, 99.5% or more) to SEQ ID NO: 125; and/or (b) comprising a fragment of at least ‘n’ consecutive amino acids of SEQ ID NO: 125, wherein ‘n’ is 7 or more (e.g. 8, 10, 12, 14, 16, 18, 20, 25, 30, 35, 40, 50, 60, 70, 80, 90, 100, 150, 200, 250 or more). These IC91 proteins include variants of SEQ ID NO: 125. Preferred fragments of (b) comprise an epitope from SEQ ID NO: 125. Other preferred fragments lack one or more amino acids (e.g. 1, 2, 3, 4, 5, 6, 7, 8, 9, 10, 15, 20, 25 or more) from the C-terminus and/or one or more amino acids (e.g. 1, 2, 3, 4, 5, 6, 7, 8, 9, 10, 15, 20, 25 or more) from the N-terminus of SEQ ID NO: 125 while retaining at least one epitope of SEQ ID NO: 125. Other fragments omit one or more protein domains. Immunogenic fragments of IC91 are identified in table 1 of reference 10.

[0485] IC92

[0486] IC92 is annotated in reference 10 as a hypothetical protein. For reference purposes, the amino acid sequence of full length IC92 is SEQ ID NO: 126 herein. In the R6 genome IC92 is spr0695 [84]. The use of IC92 for immunisation is reported in reference 10 (SEQ ID NO: 248 therein).

[0487] Preferred IC92 polypeptides for use with the invention comprise an amino acid sequence: (a) having 50% or more identity (e.g. 60%, 65%, 70%, 75%, 80%, 85%, 90%, 91%, 92%, 93%, 94%, 95%, 96%, 97%, 98%, 99%, 99.5% or more) to SEQ ID NO: 126; and/or (b) comprising a fragment of at least ‘n’ consecutive amino acids of SEQ ID NO: 126, wherein ‘n’ is 7 or more (e.g. 8, 10, 12, 14, 16, 18, 20, 25, 30, 35, 40, 50, 60, 70, 80, 90, 100, 150, 200, 250 or more). These IC92 proteins include variants of SEQ ID NO: 126. Preferred fragments of (b) comprise an epitope from SEQ ID NO: 126. Other preferred fragments lack one or more amino acids (e.g. 1, 2, 3, 4, 5, 6, 7, 8, 9, 10, 15, 20, 25 or more) from the C-terminus and/or one or more amino acids (e.g. 1, 2, 3, 4, 5, 6, 7, 8, 9, 10, 15, 20, 25 or more) from the N-terminus of SEQ ID NO: 126 while retaining at least one epitope of SEQ ID NO: 126. Other fragments omit one or more protein domains. Immunogenic fragments of IC92 are identified in table 1 of reference 10.

[0488] IC93

[0489] IC93 is annotated in reference 10 as a hypothetical protein. For reference purposes, the amino acid sequence of full length IC93 is SEQ ID NO: 127 herein. In the R6 genome IC93 is spr1334 [84]. The use of IC93 for immunisation is reported in reference 10 (SEQ ID NO: 249 therein).

[0490] Preferred IC93 polypeptides for use with the invention comprise an amino acid sequence: (a) having 50% or more identity (e.g. 60%, 65%, 70%, 75%, 80%, 85%, 90%, 91%, 92%, 93%, 94%, 95%, 96%, 97%, 98%, 99%, 99.5% or more) to SEQ ID NO: 127; and/or (b) comprising a fragment of at least ‘n’ consecutive amino acids of SEQ ID NO: 127, wherein ‘n’ is 7 or more (e.g. 8, 10, 12, 14, 16, 18, 20, 25, 30, 35, 40, 50, 60, 70, 80, 90, 100, 150, 200, 250 or more). These IC93 proteins include variants of SEQ ID NO: 127. Preferred fragments of (b) comprise an epitope from SEQ ID NO: 127. Other preferred fragments lack one or more amino acids (e.g. 1, 2, 3, 4, 5, 6, 7, 8, 9, 10, 15, 20, 25 or more) from the C-terminus and/or one or more amino acids (e.g. 1, 2, 3, 4, 5, 6, 7, 8, 9, 10, 15, 20, 25 or more) from the N-terminus of SEQ ID NO: 127 while retaining at least one epitope of SEQ ID NO: 127. Other fragments omit one or more protein domains. Immunogenic fragments of IC93 are identified in table 1 of reference 10.

[0491] IC94

[0492] IC94 is annotated in reference 10 as a hypothetical protein. For reference purposes, the amino acid sequence of full length IC94 is SEQ ID NO: 128 herein. In the R6 genome IC94 is spr0242 [84]. The use of IC94 for immunisation is reported in reference 10 (SEQ ID NO: 250 therein).

[0493] Preferred IC94 polypeptides for use with the invention comprise an amino acid sequence: (a) having 50% or more identity (e.g. 60%, 65%, 70%, 75%, 80%, 85%, 90%, 91%, 92%, 93%, 94%, 95%, 96%, 97%, 98%, 99%, 99.5% or more) to SEQ ID NO: 128; and/or (b) comprising a fragment of at least ‘n’ consecutive amino acids of SEQ ID NO: 128, wherein ‘n’ is 7 or more (e.g. 8, 10, 12, 14, 16, 18, 20, 25, 30, 35, 40, 50, 60, 70, 80, 90, 100, 150, 200, 250 or more). These IC94 proteins include variants of SEQ ID NO: 128. Preferred fragments of (b) comprise an epitope from SEQ ID NO: 128. Other preferred fragments lack one or more amino acids (e.g. 1, 2, 3, 4, 5, 6, 7, 8, 9, 10, 15, 20, 25 or more) from the C-terminus and/or one or more amino acids (e.g. 1, 2, 3, 4, 5, 6, 7, 8, 9, 10, 15, 20, 25 or more) from the N-terminus of SEQ ID NO: 128 while retaining at least one epitope of SEQ ID NO: 128. Other fragments omit one or more protein domains. Immunogenic fragments of IC94 are identified in table 1 of reference 10.

[0494] IC95

[0495] IC95 is annotated in reference 10 as a hypothetical protein. For reference purposes, the amino acid sequence of full length IC95 is SEQ ID NO: 129 herein. In the R6 genome IC95 is spr1367 [84]. The use of IC95 for immunisation is reported in reference 10 (SEQ ID NO: 251 therein).

[0496] Preferred IC95 polypeptides for use with the invention comprise an amino acid sequence: (a) having 50% or more identity (e.g. 60%, 65%, 70%, 75%, 80%, 85%, 90%, 91%, 92%, 93%, 94%, 95%, 96%, 97%, 98%, 99%, 99.5% or more) to SEQ ID NO: 129; and/or (b) comprising a fragment of at least consecutive amino acids of SEQ ID NO: 129, wherein ‘n’ is 7 or more (e.g. 8, 10, 12, 14, 16, 18, 20, 25, 30, 35, 40, 50, 60, 70, 80, 90, 100, 150, 200, 250 or more). These IC95 proteins include variants of SEQ ID NO: 129. Preferred fragments of (b) comprise an epitope from SEQ ID NO: 129. Other preferred fragments lack one or more amino acids (e.g. 1, 2, 3, 4, 5, 6, 7, 8, 9, 10, 15, 20, 25 or more) from the C-terminus and/or one or more amino acids (e.g. 1, 2, 3, 4, 5, 6, 7, 8, 9, 10, 15, 20, 25 or more) from the N-terminus of SEQ ID NO: 129 while retaining at least one epitope of SEQ ID NO: 129. Other fragments omit one or more protein domains. Immunogenic fragments of IC95 are identified in table 1 of reference 10.

[0497] IC96

[0498] IC96 is annotated in reference 10 as a hypothetical protein. For reference purposes, the amino acid sequence of full length IC96 is SEQ ID NO: 130 herein. The use of IC96 for immunisation is reported in reference 10 (SEQ ID NO: 252 therein).

[0499] Preferred IC96 polypeptides for use with the invention comprise an amino acid sequence: (a) having 50% or more identity (e.g. 60%, 65%, 70%, 75%, 80%, 85%, 90%, 91%, 92%, 93%, 94%, 95%, 96%, 97%, 98%, 99%, 99.5% or more) to SEQ ID NO: 130; and/or (b) comprising a fragment of at least ‘n’ consecutive amino acids of SEQ ID NO: 130, wherein ‘n’ is 7 or more (e.g. 8, 10, 12, 14, 16, 18, 20, 25, 30, 35, 40, 50, 60, 70, 80, 90, 100, 150, 200, 250 or more). These IC96 proteins include variants of SEQ ID NO: 130. Preferred fragments of (b) comprise an epitope from SEQ ID NO: 130. Other preferred fragments lack one or more amino acids (e.g. 1, 2, 3, 4, 5, 6, 7, 8, 9, 10, 15, 20, 25 or more) from the C-terminus and/or one or more amino acids (e.g. 1, 2, 3, 4, 5, 6, 7, 8, 9, 10, 15, 20, 25 or more) from the N-terminus of SEQ ID NO: 130 while retaining at least one epitope of SEQ ID NO: 130. Other fragments omit one or more protein domains. Immunogenic fragments of IC96 are identified in table 1 of reference 10.

[0500] IC97

[0501] IC97 is annotated in reference 10 as a hypothetical protein. For reference purposes, the amino acid sequence of full length IC97 is SEQ ID NO: 131 herein. In the R6 genome IC97 is spr1502 [84]. The use of IC97 for immunisation is reported in reference 10 (SEQ ID NO: 253 therein).

[0502] Preferred IC97 polypeptides for use with the invention comprise an amino acid sequence: (a) having 50% or more identity (e.g. 60%, 65%, 70%, 75%, 80%, 85%, 90%, 91%, 92%, 93%, 94%, 95%, 96%, 97%, 98%, 99%, 99.5% or more) to SEQ ID NO: 131; and/or (b) comprising a fragment of at least ‘n’ consecutive amino acids of SEQ ID NO: 131, wherein ‘n’ is 7 or more (e.g. 8, 10, 12, 14, 16, 18, 20, 25, 30, 35, 40, 50, 60, 70, 80, 90, 100, 150, 200, 250 or more). These IC97 proteins include variants of SEQ ID NO: 131. Preferred fragments of (b) comprise an epitope from SEQ ID NO: 131. Other preferred fragments lack one or more amino acids (e.g. 1, 2, 3, 4, 5, 6, 7, 8, 9, 10, 15, 20, 25 or more) from the C-terminus and/or one or more amino acids (e.g. 1, 2, 3, 4, 5, 6, 7, 8, 9, 10, 15, 20, 25 or more) from the N-terminus of SEQ ID NO: 131 while retaining at least one epitope of SEQ NO: 131. Other fragments omit one or more protein domains. Immunogenic fragments of IC97 are identified in table 1 of reference 10.

[0503] IC98

[0504] IC98 is annotated in reference 10 as a hypothetical protein. For reference purposes, the amino acid sequence of full length IC98 is SEQ ID NO: 132 herein. In the R6 genome IC98 is spr0730 [84]. The use of IC98 for immunisation is reported in reference 10 (SEQ ID NO: 254 therein).

[0505] Preferred IC98 polypeptides for use with the invention comprise an amino acid sequence: (a) having 50% or more identity (e.g. 60%, 65%, 70%, 75%, 80%, 85%, 90%, 91%, 92%, 93%, 94%, 95%, 96%, 97%, 98%, 99%, 99.5% or more) to SEQ ID NO: 132; and/or (b) comprising a fragment of at least ‘n’ consecutive amino acids of SEQ ID NO: 132, wherein ‘n’ is 7 or more (e.g. 8, 10, 12, 14, 16, 18, 20, 25, 30, 35, 40, 50, 60, 70, 80, 90, 100, 150, 200, 250 or more). These IC98 proteins include variants of SEQ ID NO: 132. Preferred fragments of (b) comprise an epitope from SEQ ID NO: 132. Other preferred fragments lack one or more amino acids (e.g. 1, 2, 3, 4, 5, 6, 7, 8, 9, 10, 15, 20, 25 or more) from the C-terminus and/or one or more amino acids (e.g. 1, 2, 3, 4, 5, 6, 7, 8, 9, 10, 15, 20, 25 or more) from the N-terminus of SEQ ID NO: 132 while retaining at least one epitope of SEQ ID NO: 132. Other fragments omit one or more protein domains. Immunogenic fragments of IC98 are identified in table 1 of reference 10.

[0506] IC99

[0507] IC99 is annotated in reference 10 as a hypothetical protein. For reference purposes, the amino acid sequence of full length IC99 is SEQ ID NO: 133 herein. In the R6 genome IC99 is spr1961 [84]. The use of IC99 for immunisation is reported in reference 10 (SEQ ID NO: 255 therein).

[0508] Preferred IC99 polypeptides for use with the invention comprise an amino acid sequence: (a) having 50% or more identity (e.g. 60%, 65%, 70%, 75%, 80%, 85%, 90%, 91%, 92%, 93%, 94%, 95%, 96%, 97%, 98%, 99%, 99.5% or more) to SEQ ID NO: 133; and/or (b) comprising a fragment of at least ‘n’ consecutive amino acids of SEQ ID NO: 133, wherein ‘n’ is 7 or more (e.g. 8, 10, 12, 14, 16, 18, 20, 25, 30, 35, 40, 50, 60, 70, 80, 90, 100, 150, 200, 250 or more). These IC99 proteins include variants of SEQ ID NO: 133. Preferred fragments of (b) comprise an epitope from SEQ ID NO: 133. Other preferred fragments lack one or more amino acids (e.g. 1, 2, 3, 4, 5, 6, 7, 8, 9, 10, 15, 20, 25 or more) from the C-terminus and/or one or more amino acids (e.g. 1, 2, 3, 4, 5, 6, 7, 8, 9, 10, 15, 20, 25 or more) from the N-terminus of SEQ ID NO: 133 while retaining at least one epitope of SEQ ID NO: 133. Other fragments omit one or more protein domains. Immunogenic fragments of IC99 are identified in table 1 of reference 10.

[0509] IC100

[0510] IC100 is annotated in reference 10 as a hypothetical protein. For reference purposes, the amino acid sequence of full length IC100 is SEQ ID NO: 134 herein. The use of IC100 for immunisation is reported in reference 10 (SEQ ID NO: 256 therein).

[0511] Preferred IC100 polypeptides for use with the invention comprise an amino acid sequence: (a) having 50% or more identity (e.g. 60%, 65%, 70%, 75%, 80%, 85%, 90%, 91%, 92%, 93%, 94%, 95%, 96%, 97%, 98%, 99%, 99.5% or more) to SEQ ID NO: 134; and/or (b) comprising a fragment of at least ‘n’ consecutive amino acids of SEQ ID NO: 134, wherein ‘n’ is 7 or more (e.g. 8, 10, 12, 14, 16, 18, 20, 25, 30, 35, 40, 50, 60, 70, 80, 90, 100, 150, 200, 250 or more). These IC100 proteins include variants of SEQ ID NO: 134. Preferred fragments of (b) comprise an epitope from SEQ ID NO: 134. Other preferred fragments lack one or more amino acids (e.g. 1, 2, 3, 4, 5, 6, 7, 8, 9, 10, 15, 20, 25 or more) from the C-terminus and/or one or more amino acids (e.g. 1, 2, 3, 4, 5, 6, 7, 8, 9, 10, 15, 20, 25 or more) from the N-terminus of SEQ ID NO: 134 while retaining at least one epitope of SEQ ID NO: 134. Other fragments omit one or more protein domains. Immunogenic fragments of IC100 are identified in table 1 of reference 10.

[0512] IC101

[0513] IC101 is annotated in reference 10 as a hypothetical protein. For reference purposes, the amino acid sequence of full length IC101 is SEQ ID NO: 135 herein. In the R6 genome IC101 is spr0516 [84]. The use of IC101 for immunisation is reported in reference 10 (SEQ ID NO: 257 therein).

[0514] Preferred IC101 polypeptides for use with the invention comprise an amino acid sequence: (a) having 50% or more identity (e.g. 60%, 65%, 70%, 75%, 80%, 85%, 90%, 91%, 92%, 93%, 94%, 95%, 96%, 97%, 98%, 99%, 99.5% or more) to SEQ ID NO: 135; and/or (b) comprising a fragment of at least ‘n’ consecutive amino acids of SEQ ID NO: 135, wherein ‘n’ is 7 or more (e.g. 8, 10, 12, 14, 16, 18, 20, 25, 30, 35, 40, 50, 60, 70, 80, 90, 100, 150, 200, 250 or more). These IC101 proteins include variants of SEQ ID NO: 135. Preferred fragments of (b) comprise an epitope from SEQ ID NO: 135. Other preferred fragments lack one or more amino acids (e.g. 1, 2, 3, 4, 5, 6, 7, 8, 9, 10, 15, 20, 25 or more) from the C-terminus and/or one or more amino acids (e.g. 1, 2, 3, 4, 5, 6, 7, 8, 9, 10, 15, 20, 25 or more) from the N-terminus of SEQ ID NO: 135 while retaining at least one epitope of SEQ ID NO: 135. Other fragments omit one or more protein domains. Immunogenic fragments of IC101 are identified in table 1 of reference 10.

[0515] IC102

[0516] IC102 is annotated in reference 10 as a hypothetical protein. For reference purposes, the amino acid sequence of full length IC102 is SEQ ID NO: 136 herein. In the R6 genome IC102 is spr1785 [84]. The use of IC102 for immunisation is reported in reference 10 (SEQ ID NO: 258 therein).

[0517] Preferred IC102 polypeptides for use with the invention comprise an amino acid sequence: (a) having 50% or more identity (e.g. 60%, 65%, 70%, 75%, 80%, 85%, 90%, 91%, 92%, 93%, 94%, 95%, 96%, 97%, 98%, 99%, 99.5% or more) to SEQ ID NO: 136; and/or (b) comprising a fragment of at least ‘n’ consecutive amino acids of SEQ ID NO: 136, wherein ‘n’ is 7 or more (e.g. 8, 10, 12, 14, 16, 18, 20, 25, 30, 35, 40, 50, 60, 70, 80, 90, 100, 150, 200, 250 or more). These IC102 proteins include variants of SEQ ID NO: 136. Preferred fragments of (b) comprise an epitope from SEQ ID NO: 136. Other preferred fragments lack one or more amino acids (e.g. 1, 2, 3, 4, 5, 6, 7, 8, 9, 10, 15, 20, 25 or more) from the C-terminus and/or one or more amino acids (e.g. 1, 2, 3, 4, 5, 6, 7, 8, 9, 10, 15, 20, 25 or more) from the N-terminus of SEQ ID NO: 136 while retaining at least one epitope of SEQ ID NO: 136. Other fragments omit one or more protein domains. Immunogenic fragments of IC102 are identified in table 1 of reference 10.

[0518] IC103

[0519] IC103 is annotated in reference 10 as a hypothetical protein. For reference purposes, the amino acid sequence of full length IC103 is SEQ ID NO: 137 herein. In the R6 genome IC103 is spr0215 [84]. The use of IC103 for immunisation is reported in reference 10 (SEQ ID NO: 259 therein).

[0520] Preferred IC103 polypeptides for use with the invention comprise an amino acid sequence: (a) having 50% or more identity (e.g. 60%, 65%, 70%, 75%, 80%, 85%, 90%, 91%, 92%, 93%, 94%, 95%, 96%, 97%, 98%, 99%, 99.5% or more) to SEQ ID NO: 137; and/or (b) comprising a fragment of at least ‘n’ consecutive amino acids of SEQ ID NO: 137, wherein ‘n’ is 7 or more (e.g. 8, 10, 12, 14, 16, 18, 20, 25, 30, 35, 40, 50, 60, 70, 80, 90, 100, 150, 200, 250 or more). These IC103 proteins include variants of SEQ ID NO: 137. Preferred fragments of (b) comprise an epitope from SEQ ID NO: 137. Other preferred fragments lack one or more amino acids (e.g. 1, 2, 3, 4, 5, 6, 7, 8, 9, 10, 15, 20, 25 or more) from the C-terminus and/or one or more amino acids (e.g. 1, 2, 3, 4, 5, 6, 7, 8, 9, 10, 15, 20, 25 or more) from the N-terminus of SEQ ID NO: 137 while retaining at least one epitope of SEQ ID NO: 137. Other fragments omit one or more protein domains. Immunogenic fragments of IC103 are identified in table 1 of reference 10.

[0521] IC104

[0522] IC104 is annotated in reference 10 as a hypothetical protein. For reference purposes, the amino acid sequence of full length IC104 is SEQ ID NO: 138 herein. In the R6 genome IC104 is spr1815 [84]. The use of IC104 for immunisation is reported in reference 10 (SEQ ID NO: 260 therein).

[0523] Preferred IC104 polypeptides for use with the invention comprise an amino acid sequence: (a) having 50% or more identity (e.g. 60%, 65%, 70%, 75%, 80%, 85%, 90%, 91%, 92%, 93%, 94%, 95%, 96%, 97%, 98%, 99%, 99.5% or more) to SEQ ID NO: 138; and/or (b) comprising a fragment of at least ‘n’ consecutive amino acids of SEQ ID NO: 138, wherein ‘n’ is 7 or more (e.g. 8, 10, 12, 14, 16, 18, 20, 25, 30, 35, 40, 50, 60, 70, 80, 90, 100, 150, 200, 250 or more). These IC104 proteins include variants of SEQ ID NO: 138. Preferred fragments of (b) comprise an epitope from SEQ ID NO: 138. Other preferred fragments lack one or more amino acids (e.g. 1, 2, 3, 4, 5, 6, 7, 8, 9, 10, 15, 20, 25 or more) from the C-terminus and/or one or more amino acids (e.g. 1, 2, 3, 4, 5, 6, 7, 8, 9, 10, 15, 20, 25 or more) from the N-terminus of SEQ ID NO: 138 while retaining at least one epitope of SEQ ID NO: 138. Other fragments omit one or more protein domains. Immunogenic fragments of IC104 are identified in table 1 of reference 10.

[0524] IC105

[0525] IC105 is annotated in reference 10 as a hypothetical protein. For reference purposes, the amino acid sequence of full length IC105 is SEQ ID NO: 139 herein. In the R6 genome IC105 is spr0102 [84]. The use of IC105 for immunisation is reported in reference 10 (SEQ ID NO: 261 therein).

[0526] Preferred IC105 polypeptides for use with the invention comprise an amino acid sequence: (a) having 50% or more identity (e.g. 60%, 65%, 70%, 75%, 80%, 85%, 90%, 91%, 92%, 93%, 94%, 95%, 96%, 97%, 98%, 99%, 99.5% or more) to SEQ ID NO: 139; and/or (b) comprising a fragment of at least ‘n’ consecutive amino acids of SEQ ID NO: 139, wherein ‘n’ is 7 or more (e.g. 8, 10, 12, 14, 16, 18, 20, 25, 30, 35, 40, 50, 60, 70, 80, 90, 100, 150, 200, 250 or more). These IC105 proteins include variants of SEQ ID NO: 139. Preferred fragments of (b) comprise an epitope from SEQ ID NO: 139. Other preferred fragments lack one or more amino acids (e.g. 1, 2, 3, 4, 5, 6, 7, 8, 9, 10, 15, 20, 25 or more) from the C-terminus and/or one or more amino acids (e.g. 1, 2, 3, 4, 5, 6, 7, 8, 9, 10, 15, 20, 25 or more) from the N-terminus of SEQ ID NO: 139 while retaining at least one epitope of SEQ ID NO: 139. Other fragments omit one or more protein domains. Immunogenic fragments of IC105 are identified in table 1 of reference 10.

[0527] IC106

[0528] IC106 is annotated in reference 10 as a hypothetical protein. For reference purposes, the amino acid sequence of full length IC106 is SEQ ID NO: 140 herein. In the R6 genome IC106 is spr1994 [84]. The use of IC106 for immunisation is reported in reference 10 (SEQ ID NO: 262 therein).

[0529] Preferred IC106 polypeptides for use with the invention comprise an amino acid sequence: (a) having 50% or more identity (e.g. 60%, 65%, 70%, 75%, 80%, 85%, 90%, 91%, 92%, 93%, 94%, 95%, 96%, 97%, 98%, 99%, 99.5% or more) to SEQ ID NO: 140; and/or (b) comprising a fragment of at least ‘n’ consecutive amino acids of SEQ ID NO: 140, wherein ‘n’ is 7 or more (e.g. 8, 10, 12, 14, 16, 18, 20, 25, 30, 35, 40, 50, 60, 70, 80, 90, 100, 150, 200, 250 or more). These IC106 proteins include variants of SEQ ID NO: 140. Preferred fragments of (b) comprise an epitope from SEQ ID NO: 140. Other preferred fragments lack one or more amino acids (e.g. 1, 2, 3, 4, 5, 6, 7, 8, 9, 10, 15, 20, 25 or more) from the C-terminus and/or one or more amino acids (e.g. 1, 2, 3, 4, 5, 6, 7, 8, 9, 10, 15, 20, 25 or more) from the N-terminus of SEQ ID NO: 140 while retaining at least one epitope of SEQ ID NO: 140. Other fragments omit one or more protein domains. Immunogenic fragments of IC106 are identified in table 1 of reference 10.

[0530] IC107

[0531] IC107 is annotated in reference 10 as a hypothetical protein. For reference purposes, the amino acid sequence of full length IC107 is SEQ ID NO: 141 herein. The use of IC107 for immunisation is reported in reference 10 (SEQ ID NO: 263 therein).

[0532] Preferred IC107 polypeptides for use with the invention comprise an amino acid sequence: (a) having 50% or more identity (e.g. 60%, 65%, 70%, 75%, 80%, 85%, 90%, 91%, 92%, 93%, 94%, 95%, 96%, 97%, 98%, 99%, 99.5% or more) to SEQ ID NO: 141; and/or (b) comprising a fragment of at least ‘n’ consecutive amino acids of SEQ ID NO: 141, wherein ‘n’ is 7 or more (e.g. 8, 10, 12, 14, 16, 18, 20, 25, 30, 35, 40, 50, 60, 70, 80, 90, 100, 150, 200, 250 or more). These IC107 proteins include variants of SEQ ID NO: 141. Preferred fragments of (b) comprise an epitope from SEQ ID NO: 141. Other preferred fragments lack one or more amino acids (e.g. 1, 2, 3, 4, 5, 6, 7, 8, 9, 10, 15, 20, 25 or more) from the C-terminus and/or one or more amino acids (e.g. 1, 2, 3, 4, 5, 6, 7, 8, 9, 10, 15, 20, 25 or more) from the N-terminus of SEQ ID NO: 141 while retaining at least one epitope of SEQ ID NO: 141. Other fragments omit one or more protein domains. Immunogenic fragments of IC107 are identified in table 1 of reference 10.

[0533] IC108

[0534] IC108 is annotated in reference 10 as a hypothetical protein. For reference purposes, the amino acid sequence of full length IC108 is SEQ ID NO: 142 herein. The use of IC108 for immunisation is reported in reference 10 (SEQ ID NO: 264 therein).

[0535] Preferred IC108 polypeptides for use with the invention comprise an amino acid sequence: (a) having 50% or more identity (e.g. 60%, 65%, 70%, 75%, 80%, 85%, 90%, 91%, 92%, 93%, 94%, 95%, 96%, 97%, 98%, 99%, 99.5% or more) to SEQ ID NO: 142; and/or (b) comprising a fragment of at least ‘n’ consecutive amino acids of SEQ ID NO: 142, wherein ‘n’ is 7 or more (e.g. 8, 10, 12, 14, 16, 18, 20, 25, 30, 35, 40, 50, 60, 70, 80, 90, 100, 150, 200, 250 or more). These IC108 proteins include variants of SEQ ID NO: 142. Preferred fragments of (b) comprise an epitope from SEQ ID NO: 142. Other preferred fragments lack one or more amino acids (e.g. 1, 2, 3, 4, 5, 6, 7, 8, 9, 10, 15, 20, 25 or more) from the C-terminus and/or one or more amino acids (e.g. 1, 2, 3, 4, 5, 6, 7, 8, 9, 10, 15, 20, 25 or more) from the N-terminus of SEQ ID NO: 142 while retaining at least one epitope of SEQ ID NO: 142. Other fragments omit one or more protein domains. Immunogenic fragments of IC108 are identified in table 1 of reference 10.

[0536] IC109

[0537] IC109 is annotated in reference 10 as a hypothetical protein. For reference purposes, the amino acid sequence of full length IC109 is SEQ ID NO: 143 herein. In the R6 genome IC109 is spr0309 [84]. The use of IC109 for immunisation is reported in reference 10 (SEQ ID NO: 265 therein).

[0538] Preferred IC109 polypeptides for use with the invention comprise an amino acid sequence: (a) having 50% or more identity (e.g. 60%, 65%, 70%, 75%, 80%, 85%, 90%, 91%, 92%, 93%, 94%, 95%, 96%, 97%, 98%, 99%, 99.5% or more) to SEQ ID NO: 143; and/or (b) comprising a fragment of at least ‘n’ consecutive amino acids of SEQ ID NO: 143, wherein ‘n’ is 7 or more (e.g. 8, 10, 12, 14, 16, 18, 20, 25, 30, 35, 40, 50, 60, 70, 80, 90, 100, 150, 200, 250 or more). These IC109 proteins include variants of SEQ ID NO: 143. Preferred fragments of (b) comprise an epitope from SEQ ID NO: 143. Other preferred fragments lack one or more amino acids (e.g. 1, 2, 3, 4, 5, 6, 7, 8, 9, 10, 15, 20, 25 or more) from the C-terminus and/or one or more amino acids (e.g. 1, 2, 3, 4, 5, 6, 7, 8, 9, 10, 15, 20, 25 or more) from the N-terminus of SEQ ID NO: 143 while retaining at least one epitope of SEQ ID NO: 143. Other fragments omit one or more protein domains. Immunogenic fragments of IC109 are identified in table 1 of reference 10.

[0539] IC110

[0540] IC110 is annotated in reference 10 as a hypothetical protein. For reference purposes, the amino acid sequence of full length IC110 is SEQ ID NO: 144 herein. In the R6 genome IC110 is spr1070 [84]. The use of IC110 for immunisation is reported in reference 10 (SEQ ID NO: 266 therein).

[0541] Preferred IC110 polypeptides for use with the invention comprise an amino acid sequence: (a) having 50% or more identity (e.g. 60%, 65%, 70%, 75%, 80%, 85%, 90%, 91%, 92%, 93%, 94%, 95%, 96%, 97%, 98%, 99%, 99.5% or more) to SEQ ID NO: 144; and/or (b) comprising a fragment of at least ‘n’ consecutive amino acids of SEQ ID NO: 144, wherein ‘n’ is 7 or more (e.g. 8, 10, 12, 14, 16, 18, 20, 25, 30, 35, 40, 50, 60, 70, 80, 90, 100, 150, 200, 250 or more). These IC110 proteins include variants of SEQ ID NO: 144. Preferred fragments of (b) comprise an epitope from SEQ ID NO: 144. Other preferred fragments lack one or more amino acids (e.g. 1, 2, 3, 4, 5, 6, 7, 8, 9, 10, 15, 20, 25 or more) from the C-terminus and/or one or more amino acids (e.g. 1, 2, 3, 4, 5, 6, 7, 8, 9, 10, 15, 20, 25 or more) from the N-terminus of SEQ ID NO: 144 while retaining at least one epitope of SEQ ID NO: 144. Other fragments omit one or more protein domains. Immunogenic fragments of IC110 are identified in table 1 of reference 10.

[0542] IC111

[0543] IC111 is annotated in reference 10 as a hypothetical protein. For reference purposes, the amino acid sequence of full length IC111 is SEQ ID NO: 145 herein. In the R6 genome IC111 is spr0258 [84]. The use of IC111 for immunisation is reported in reference 10 (SEQ ID NO: 267 therein).

[0544] Preferred IC111 polypeptides for use with the invention comprise an amino acid sequence: (a) having 50% or more identity (e.g. 60%, 65%, 70%, 75%, 80%, 85%, 90%, 91%, 92%, 93%, 94%, 95%, 96%, 97%, 98%, 99%, 99.5% or more) to SEQ ID NO: 145; and/or (b) comprising a fragment of at least ‘n’ consecutive amino acids of SEQ ID NO: 145, wherein ‘n’ is 7 or more (e.g. 8, 10, 12, 14, 16, 18, 20, 25, 30, 35, 40, 50, 60, 70, 80, 90, 100, 150, 200, 250 or more). These IC111 proteins include variants of SEQ ID NO: 145. Preferred fragments of (b) comprise an epitope from SEQ ID NO: 145. Other preferred fragments lack one or more amino acids (e.g. 1, 2, 3, 4, 5, 6, 7, 8, 9, 10, 15, 20, 25 or more) from the C-terminus and/or one or more amino acids (e.g. 1, 2, 3, 4, 5, 6, 7, 8, 9, 10, 15, 20, 25 or more) from the N-terminus of SEQ ID NO: 145 while retaining at least one epitope of SEQ ID NO: 145. Other fragments omit one or more protein domains. Immunogenic fragments of IC111 are identified in table 1 of reference 10.

[0545] IC112

[0546] IC112 is annotated in reference 10 as a hypothetical protein. For reference purposes, the amino acid sequence of full length IC112 is SEQ ID NO: 146 herein. In the R6 genome IC112 is spr0254 [84]. The use of IC112 for immunisation is reported in reference 10 (SEQ ID NO: 268 therein).

[0547] Preferred IC112 polypeptides for use with the invention comprise an amino acid sequence: (a) having 50% or more identity (e.g. 60%, 65%, 70%, 75%, 80%, 85%, 90%, 91%, 92%, 93%, 94%, 95%, 96%, 97%, 98%, 99%, 99.5% or more) to SEQ ID NO: 146; and/or (b) comprising a fragment of at least ‘n’ consecutive amino acids of SEQ ID NO: 146, wherein ‘n’ is 7 or more (e.g. 8, 10, 12, 14, 16, 18, 20, 25, 30, 35, 40, 50, 60, 70, 80, 90, 100, 150, 200, 250 or more). These IC112 proteins include variants of SEQ ID NO: 146. Preferred fragments of (b) comprise an epitope from SEQ ID NO: 146. Other preferred fragments lack one or more amino acids (e.g. 1, 2, 3, 4, 5, 6, 7, 8, 9, 10, 15, 20, 25 or more) from the C-terminus and/or one or more amino acids (e.g. 1, 2, 3, 4, 5, 6, 7, 8, 9, 10, 15, 20, 25 or more) from the N-terminus of SEQ ID NO: 146 while retaining at least one epitope of SEQ ID NO: 146. Other fragments omit one or more protein domains. Immunogenic fragments of IC112 are identified in table 1 of reference 10.

[0548] IC113

[0549] IC113 is annotated in reference 10 as a hypothetical protein. For reference purposes, the amino acid sequence of full length IC113 is SEQ ID NO: 147 herein. In the R6 genome IC113 is spr0171 [84]. The use of IC113 for immunisation is reported in reference 10 (SEQ ID NO: 269 therein).

[0550] Preferred IC113 polypeptides for use with the invention comprise an amino acid sequence: (a) having 50% or more identity (e.g. 60%, 65%, 70%, 75%, 80%, 85%, 90%, 91%, 92%, 93%, 94%, 95%, 96%, 97%, 98%, 99%, 99.5% or more) to SEQ ID NO: 147; and/or (b) comprising a fragment of at least ‘n’ consecutive amino acids of SEQ ID NO: 147, wherein ‘n’ is 7 or more (e.g. 8, 10, 12, 14, 16, 18, 20, 25, 30, 35, 40, 50, 60, 70, 80, 90, 100, 150, 200, 250 or more). These IC113 proteins include variants of SEQ ID NO: 147. Preferred fragments of (b) comprise an epitope from SEQ ID NO: 147. Other preferred fragments lack one or more amino acids (e.g. 1, 2, 3, 4, 5, 6, 7, 8, 9, 10, 15, 20, 25 or more) from the C-terminus and/or one or more amino acids (e.g. 1, 2, 3, 4, 5, 6, 7, 8, 9, 10, 15, 20, 25 or more) from the N-terminus of SEQ ID NO: 147 while retaining at least one epitope of SEQ ID NO: 147. Other fragments omit one or more protein domains. Immunogenic fragments of IC113 are identified in table 1 of reference 10.

[0551] IC114

[0552] IC114 is annotated in reference 10 as a hypothetical protein. For reference purposes, the amino acid sequence of full length IC114 is SEQ ID NO: 148 herein. The use of IC114 for immunisation is reported in reference 10 (SEQ ID NO: 270 therein).

[0553] Preferred IC114 polypeptides for use with the invention comprise an amino acid sequence: (a) having 50% or more identity (e.g. 60%, 65%, 70%, 75%, 80%, 85%, 90%, 91%, 92%, 93%, 94%, 95%, 96%, 97%, 98%, 99%, 99.5% or more) to SEQ ID NO: 148; and/or (b) comprising a fragment of at least ‘n’ consecutive amino acids of SEQ ID NO: 148, wherein ‘n’ is 7 or more (e.g. 8, 10, 12, 14, 16, 18, 20, 25, 30, 35, 40, 50, 60, 70, 80, 90, 100, 150, 200, 250 or more). These IC114 proteins include variants of SEQ ID NO: 148. Preferred fragments of (b) comprise an epitope from SEQ ID NO: 148. Other preferred fragments lack one or more amino acids (e.g. 1, 2, 3, 4, 5, 6, 7, 8, 9, 10, 15, 20, 25 or more) from the C-terminus and/or one or more amino acids (e.g. 1, 2, 3, 4, 5, 6, 7, 8, 9, 10, 15, 20, 25 or more) from the N-terminus of SEQ ID NO: 148 while retaining at least one epitope of SEQ ID NO: 148. Other fragments omit one or more protein domains. Immunogenic fragments of IC114 are identified in table 1 of reference 10.

[0554] IC115

[0555] IC115 is annotated in reference 10 as a hypothetical protein. For reference purposes, the amino acid sequence of full length IC115 is SEQ ID NO: 149 herein. In the R6 genome IC115 is spr0464 [84]. The use of IC115 for immunisation is reported in reference 10 (SEQ ID NO: 271 therein).

[0556] Preferred IC115 polypeptides for use with the invention comprise an amino acid sequence: (a) having 50% or more identity (e.g. 60%, 65%, 70%, 75%, 80%, 85%, 90%, 91%, 92%, 93%, 94%, 95%, 96%, 97%, 98%, 99%, 99.5% or more) to SEQ ID NO: 149; and/or (b) comprising a fragment of at least ‘n’ consecutive amino acids of SEQ ID NO: 149, wherein ‘n’ is 7 or more (e.g. 8, 10, 12, 14, 16, 18, 20, 25, 30, 35, 40, 50, 60, 70, 80, 90, 100, 150, 200, 250 or more). These IC115 proteins include variants of SEQ ID NO: 149. Preferred fragments of (b) comprise an epitope from SEQ ID NO: 149. Other preferred fragments lack one or more amino acids (e.g. 1, 2, 3, 4, 5, 6, 7, 8, 9, 10, 15, 20, 25 or more) from the C-terminus and/or one or more amino acids (e.g. 1, 2, 3, 4, 5, 6, 7, 8, 9, 10, 15, 20, 25 or more) from the N-terminus of SEQ ID NO: 149 while retaining at least one epitope of SEQ ID NO: 149. Other fragments omit one or more protein domains. Immunogenic fragments of IC115 are identified in table 1 of reference 10.

[0557] IC116

[0558] IC116 is annotated in reference 10 as a hypothetical protein. For reference purposes, the amino acid sequence of full length IC116 is SEQ ID NO: 150 herein. In the R6 genome IC116 is spr0026 [84]. The use of IC116 for immunisation is reported in reference 10 (SEQ ID NO: 272 therein).

[0559] Preferred IC116 polypeptides for use with the invention comprise an amino acid sequence: (a) having 50% or more identity (e.g. 60%, 65%, 70%, 75%, 80%, 85%, 90%, 91%, 92%, 93%, 94%, 95%, 96%, 97%, 98%, 99%, 99.5% or more) to SEQ ID NO: 150; and/or (b) comprising a fragment of at least ‘n’ consecutive amino acids of SEQ ID NO: 150, wherein ‘n’ is 7 or more (e.g. 8, 10, 12, 14, 16, 18, 20, 25, 30, 35, 40, 50, 60, 70, 80, 90, 100, 150, 200, 250 or more). These IC116 proteins include variants of SEQ ID NO: 150. Preferred fragments of (b) comprise an epitope from SEQ ID NO: 150. Other preferred fragments lack one or more amino acids (e.g. 1, 2, 3, 4, 5, 6, 7, 8, 9, 10, 15, 20, 25 or more) from the C-terminus and/or one or more amino acids (e.g. 1, 2, 3, 4, 5, 6, 7, 8, 9, 10, 15, 20, 25 or more) from the N-terminus of SEQ ID NO: 150 while retaining at least one epitope of SEQ ID NO: 150. Other fragments omit one or more protein domains. Immunogenic fragments of IC116 are identified in table 1 of reference 10.

[0560] IC117

[0561] IC117 is annotated in reference 10 as a hypothetical protein. For reference purposes, the amino acid sequence of full length IC117 is SEQ ID NO: 151 herein. In the R6 genome IC117 is spr1652 [84]. The use of IC117 for immunisation is reported in reference 10 (SEQ ID NO: 273 therein).

[0562] Preferred IC117 polypeptides for use with the invention comprise an amino acid sequence: (a) having 50% or more identity (e.g. 60%, 65%, 70%, 75%, 80%, 85%, 90%, 91%, 92%, 93%, 94%, 95%, 96%, 97%, 98%, 99%, 99.5% or more) to SEQ ID NO: 151; and/or (b) comprising a fragment of at least ‘n’ consecutive amino acids of SEQ ID NO: 151, wherein ‘n’ is 7 or more (e.g. 8, 10, 12, 14, 16, 18, 20, 25, 30, 35, 40, 50, 60, 70, 80, 90, 100, 150, 200, 250 or more). These IC117 proteins include variants of SEQ ID NO: 151. Preferred fragments of (b) comprise an epitope from SEQ ID NO: 151. Other preferred fragments lack one or more amino acids (e.g. 1, 2, 3, 4, 5, 6, 7, 8, 9, 10, 15, 20, 25 or more) from the C-terminus and/or one or more amino acids (e.g. 1, 2, 3, 4, 5, 6, 7, 8, 9, 10, 15, 20, 25 or more) from the N-terminus of SEQ ID NO: 151 while retaining at least one epitope of SEQ ID NO: 151. Other fragments omit one or more protein domains. Immunogenic fragments of IC117 are identified in table 1 of reference 10.

[0563] IC118

[0564] IC118 is annotated in reference 10 as a hypothetical protein. For reference purposes, the amino acid sequence of full length IC118 is SEQ ID NO: 152 herein. In the R6 genome IC118 is spr1783 [84]. The use of IC118 for immunisation is reported in reference 10 (SEQ ID NO: 274 therein).

[0565] Preferred IC118 polypeptides for use with the invention comprise an amino acid sequence: (a) having 50% or more identity (e.g. 60%, 65%, 70%, 75%, 80%, S5%, 90%, 91%, 92%, 93%, 94%, 95%, 96%, 97%, 98%, 99%, 99.5% or more) to SEQ ID NO: 152; and/or (b) comprising a fragment of at least ‘n’ consecutive amino acids of SEQ ID NO: 152, wherein ‘n’ is 7 or more (e.g. 8, 10, 12, 14, 16, 18, 20, 25, 30, 35, 40, 50, 60, 70, 80, 90, 100, 150, 200, 250 or more). These IC118 proteins include variants of SEQ ID NO: 152. Preferred fragments of (b) comprise an epitope from SEQ ID NO: 152. Other preferred fragments lack one or more amino acids (e.g. 1, 2, 3, 4, 5, 6, 7, 8, 9, 10, 15, 20, 25 or more) from the C-terminus and/or one or more amino acids (e.g. 1, 2, 3, 4, 5, 6, 7, 8, 9, 10, 15, 20, 25 or more) from the N-terminus of SEQ ID NO: 152 while retaining at least one epitope of SEQ ID NO: 152. Other fragments omit one or more protein domains. Immunogenic fragments of IC118 are identified in table 1 of reference 10.

[0566] IC119

[0567] IC119 is annotated in reference 10 as a hypothetical protein. For reference purposes, the amino acid sequence of full length IC119 is SEQ ID NO: 153 herein. The use of IC119 for immunisation is reported in reference 10 (SEQ ID NO: 275 therein).

[0568] Preferred IC119 polypeptides for use with the invention comprise an amino acid sequence: (a) having 50% or more identity (e.g. 60%, 65%, 70%, 75%, 80%, 85%, 90%, 91%, 92%, 93%, 94%, 95%, 96%, 97%, 98%, 99%, 99.5% or more) to SEQ ID NO: 153; and/or (b) comprising a fragment of at least ‘n’ consecutive amino acids of SEQ ID NO: 153, wherein ‘n’ is 7 or more (e.g. 8, 10, 12, 14, 16, 18, 20, 25, 30, 35, 40, 50, 60, 70, 80, 90, 100, 150, 200, 250 or more). These IC119 proteins include variants of SEQ ID NO: 153. Preferred fragments of (b) comprise an epitope from SEQ ID NO: 153. Other preferred fragments lack one or more amino acids (e.g. 1, 2, 3, 4, 5, 6, 7, 8, 9, 10, 15, 20, 25 or more) from the C-terminus and/or one or more amino acids (e.g. 1, 2, 3, 4, 5, 6, 7, 8, 9, 10, 15, 20, 25 or more) from the N-terminus of SEQ ID NO: 153 while retaining at least one epitope of SEQ ID NO: 153. Other fragments omit one or more protein domains. Immunogenic fragments of IC119 are identified in table 1 of reference 10.

[0569] IC120

[0570] IC120 is annotated in reference 10 as a hypothetical protein. For reference purposes, the amino acid sequence of full length IC120 is SEQ ID NO: 154 herein. In the R6 genome IC120 is spr1153 [84]. The use of IC120 for immunisation is reported in reference 10 (SEQ ID NO: 276 therein).

[0571] Preferred IC120 polypeptides for use with the invention comprise an amino acid sequence: (a) having 50% or more identity (e.g. 60%, 65%, 70%, 75%, 80%, 85%, 90%, 91%, 92%, 93%, 94%, 95%, 96%, 97%, 98%, 99%, 99.5% or more) to SEQ ID NO: 154; and/or (b) comprising a fragment of at least ‘n’ consecutive amino acids of SEQ ID NO: 154, wherein ‘n’ is 7 or more (e.g. 8, 10, 12, 14, 16, 18, 20, 25, 30, 35, 40, 50, 60, 70, 80, 90, 100, 150, 200, 250 or more). These IC120 proteins include variants of SEQ ID NO: 154. Preferred fragments of (b) comprise an epitope from SEQ ID NO: 154. Other preferred fragments lack one or more amino acids (e.g. 1, 2, 3, 4, 5, 6, 7, 8, 9, 10, 15, 20, 25 or more) from the C-terminus and/or one or more amino acids (e.g. 1, 2, 3, 4, 5, 6, 7, 8, 9, 10, 15, 20, 25 or more) from the N-terminus of SEQ ID NO: 154 while retaining at least one epitope of SEQ ID NO: 154. Other fragments omit one or more protein domains. Immunogenic fragments of IC120 are identified in table 1 of reference 10.

[0572] IC121

[0573] IC121 is annotated in reference 10 as a hypothetical protein. For reference purposes, the amino acid sequence of full length IC121 is SEQ ID NO: 155 herein. In the R6 genome IC121 is spr1977 [84]. The use of IC121 for immunisation is reported in reference 10 (SEQ ID NO: 277 therein).

[0574] Preferred IC121 polypeptides for use with the invention comprise an amino acid sequence: (a) having 50% or more identity (e.g. 60%, 65%, 70%, 75%, 80%, 85%, 90%, 91%, 92%, 93%, 94%, 95%, 96%, 97%, 98%, 99%, 99.5% or more) to SEQ ID NO: 155; and/or (b) comprising a fragment of at least ‘n’ consecutive amino acids of SEQ ID NO: 155, wherein ‘n’ is 7 or more (e.g. 8, 10, 12, 14, 16, 18, 20, 25, 30, 35, 40, 50, 60, 70, 80, 90, 100, 150, 200, 250 or more). These IC121 proteins include variants of SEQ ID NO: 155. Preferred fragments of (b) comprise an epitope from SEQ ID NO: 155. Other preferred fragments lack one or more amino acids (e.g. 1, 2, 3, 4, 5, 6, 7, 8, 9, 10, 15, 20, 25 or more) from the C-terminus and/or one or more amino acids (e.g. 1, 2, 3, 4, 5, 6, 7, 8, 9, 10, 15, 20, 25 or more) from the N-terminus of SEQ ID NO: 155 while retaining at least one epitope of SEQ ID NO: 155. Other fragments omit one or more protein domains. Immunogenic fragments of IC121 are identified in table 1 of reference 10.

[0575] IC122

[0576] IC122 is annotated in reference 10 as a hypothetical protein. For reference purposes, the amino acid sequence of full length IC122 is SEQ ID NO: 156 herein. The use of IC122 for immunisation is reported in reference 10 (SEQ ID NO: 278 therein).

[0577] Preferred IC122 polypeptides for use with the invention comprise an amino acid sequence: (a) having 50% or more identity (e.g. 60%, 65%, 70%, 75%, 80%, 85%, 90%, 91%, 92%, 93%, 94%, 95%, 96%, 97%, 98%, 99%, 99.5% or more) to SEQ ID NO: 156; and/or (b) comprising a fragment of at least ‘n’ consecutive amino acids of SEQ ID NO: 156, wherein ‘n’ is 7 or more (e.g. 8, 10, 12, 14, 16, 18, 20, 25, 30, 35, 40, 50, 60, 70, 80, 90, 100, 150, 200, 250 or more). These IC122 proteins include variants of SEQ ID NO: 156. Preferred fragments of (b) comprise an epitope from SEQ ID NO: 156. Other preferred fragments lack one or more amino acids (e.g. 1, 2, 3, 4, 5, 6, 7, 8, 9, 10, 15, 20, 25 or more) from the C-terminus and/or one or more amino acids (e.g. 1, 2, 3, 4, 5, 6, 7, 8, 9, 10, 15, 20, 25 or more) from the N-terminus of SEQ ID NO: 156 while retaining at least one epitope of SEQ ID NO: 156. Other fragments omit one or more protein domains. Immunogenic fragments of IC122 are identified in table 1 of reference 10.

[0578] IC123

[0579] IC123 is annotated in reference 10 as a hypothetical protein. For reference purposes, the amino acid sequence of full length IC123 is SEQ ID NO: 157 herein. In the R6 genome IC123 is spr1049 [84]. The use of IC123 for immunisation is reported in reference 10 (SEQ ID NO: 279 therein).

[0580] Preferred IC123 polypeptides for use with the invention comprise an amino acid sequence: (a) having 50% or more identity (e.g. 60%, 65%, 70%, 75%, 80%, 85%, 90%, 91%, 92%, 93%, 94%, 95%, 96%, 97%, 98%, 99%, 99.5% or more) to SEQ ID NO: 157; and/or (b) comprising a fragment of at least ‘n’ consecutive amino acids of SEQ ID NO: 157, wherein ‘n’ is 7 or more (e.g. 8, 10, 12, 14, 16, 18, 20, 25, 30, 35, 40, 50, 60, 70, 80, 90, 100, 150, 200, 250 or more). These IC123 proteins include variants of SEQ ID NO: 157. Preferred fragments of (b) comprise an epitope from SEQ ID NO: 157. Other preferred fragments lack one or more amino acids (e.g. 1, 2, 3, 4, 5, 6, 7, 8, 9, 10, 15, 20, 25 or more) from the C-terminus and/or one or more amino acids (e.g. 1, 2, 3, 4, 5, 6, 7, 8, 9, 10, 15, 20, 25 or more) from the N-terminus of SEQ ID NO: 157 while retaining at least one epitope of SEQ ID NO: 157. Other fragments omit one or more protein domains. Immunogenic fragments of IC123 are identified in table 1 of reference 10.

[0581] IC124

[0582] IC124 is annotated in reference 10 as a hypothetical protein. For reference purposes, the amino acid sequence of full length IC124 is SEQ ID NO: 158 herein. In the R6 genome IC124 is spr1811 [84]. The use of IC124 for immunisation is reported in reference 10 (SEQ ID NO: 280 therein).

[0583] Preferred IC124 polypeptides for use with the invention comprise an amino acid sequence: (a) having 50% or more identity (e.g. 60%, 65%, 70%, 75%, 80%, 85%, 90%, 91%, 92%, 93%, 94%, 95%, 96%, 97%, 98%, 99%, 99.5% or more) to SEQ ID NO: 158; and/or (b) comprising a fragment of at least ‘n’ consecutive amino acids of SEQ ID NO: 158, wherein ‘n’ is 7 or more (e.g. 8, 10, 12, 14, 16, 18, 20, 25, 30, 35, 40, 50, 60, 70, 80, 90, 100, 150, 200, 250 or more). These IC124 proteins include variants of SEQ ID NO: 158. Preferred fragments of (b) comprise an epitope from SEQ ID NO: 158. Other preferred fragments lack one or more amino acids (e.g. 1, 2, 3, 4, 5, 6, 7, 8, 9, 10, 15, 20, 25 or more) from the C-terminus and/or one or more amino acids (e.g. 1, 2, 3, 4, 5, 6, 7, 8, 9, 10, 15, 20, 25 or more) from the N-terminus of SEQ ID NO: 158 while retaining at least one epitope of SEQ ID NO: 158. Other fragments omit one or more protein domains. Immunogenic fragments of IC124 are identified in table 1 of reference 10.

[0584] IC125

[0585] IC125 is annotated in reference 10 as a hypothetical protein. For reference purposes, the amino acid sequence of full length IC125 is SEQ ID NO: 159 herein. In the R6 genome IC125 is spr0381 [84]. The use of IC125 for immunisation is reported in reference 10 (SEQ ID NO: 281 therein).

[0586] Preferred IC125 polypeptides for use with the invention comprise an amino acid sequence: (a) having 50% or more identity (e.g. 60%, 65%, 70%, 75%, 80%, 85%, 90%, 91%, 92%, 93%, 94%, 95%, 96%, 97%, 98%, 99%, 99.5% or more) to SEQ ID NO: 159; and/or (b) comprising a fragment of at least ‘n’ consecutive amino acids of SEQ ID NO: 159, wherein ‘n’ is 7 or more (e.g. 8, 10, 12, 14, 16, 18, 20, 25, 30, 35, 40, 50, 60, 70, 80, 90, 100, 150, 200, 250 or more). These IC125 proteins include variants of SEQ ID NO: 159. Preferred fragments of (b) comprise an epitope from SEQ ID NO: 159. Other preferred fragments lack one or more amino acids (e.g. 1, 2, 3, 4, 5, 6, 7, 8, 9, 10, 15, 20, 25 or more) from the C-terminus and/or one or more amino acids (e.g. 1, 2, 3, 4, 5, 6, 7, 8, 9, 10, 15, 20, 25 or more) from the N-terminus of SEQ ID NO: 159 while retaining at least one epitope of SEQ ID NO: 159. Other fragments omit one or more protein domains. Immunogenic fragments of IC125 are identified in table 1 of reference 10.

[0587] IC126

[0588] IC126 is annotated in reference 10 as a hypothetical protein. For reference purposes, the amino acid sequence of full length IC126 is SEQ ID NO: 160 herein. The use of IC126 for immunisation is reported in reference 10 (SEQ ID NO: 282 therein).

[0589] Preferred IC126 polypeptides for use with the invention comprise an amino acid sequence: (a) having 50% or more identity (e.g. 60%, 65%, 70%, 75%, S0%, 85%, 90%, 91%, 92%, 93%, 94%, 95%, 96%, 97%, 98%, 99%, 99.5% or more) to SEQ ID NO: 160; and/or (b) comprising a fragment of at least ‘n’ consecutive amino acids of SEQ ID NO: 160, wherein ‘n’ is 7 or more (e.g. 8, 10, 12, 14, 16, 18, 20, 25, 30, 35, 40, 50, 60, 70, 80, 90, 100, 150, 200, 250 or more). These IC126 proteins include variants of SEQ ID NO: 160. Preferred fragments of (b) comprise an epitope from SEQ ID NO: 160. Other preferred fragments lack one or more amino acids (e.g. 1, 2, 3, 4, 5, 6, 7, 8, 9, 10, 15, 20, 25 or more) from the C-terminus and/or one or more amino acids (e.g. 1, 2, 3, 4, 5, 6, 7, 8, 9, 10, 15, 20, 25 or more) from the N-terminus of SEQ ID NO: 160 while retaining at least one epitope of SEQ ID NO: 160. Other fragments omit one or more protein domains. Immunogenic fragments of IC126 are identified in table 1 of reference 10.

[0590] IC127

[0591] IC127 is annotated in reference 10 as a hypothetical protein. For reference purposes, the amino acid sequence of full length IC127 is SEQ ID NO: 161 herein. In the R6 genome IC127 is spr0061 [84]. The use of IC127 for immunisation is reported in reference 10 (SEQ ID NO: 283 therein).

[0592] Preferred IC127 polypeptides for use with the invention comprise an amino acid sequence: (a) having 50% or more identity (e.g. 60%, 65%, 70%, 75%, 80%, 85%, 90%, 91%, 92%, 93%, 94%, 95%, 96%, 97%, 98%, 99%, 99.5% or more) to SEQ ID NO: 161; and/or (b) comprising a fragment of at least ‘n’ consecutive amino acids of SEQ ID NO: 161, wherein ‘n’ is 7 or more (e.g. 8, 10, 12, 14, 16, 18, 20, 25, 30, 35, 40, 50, 60, 70, 80, 90, 100, 150, 200, 250 or more). These IC127 proteins include variants of SEQ ID NO: 161. Preferred fragments of (b) comprise an epitope from SEQ ID NO: 161. Other preferred fragments lack one or more amino acids (e.g. 1, 2, 3, 4, 5, 6, 7, 8, 9, 10, 15, 20, 25 or more) from the C-terminus and/or one or more amino acids (e.g. 1, 2, 3, 4, 5, 6, 7, 8, 9, 10, 15, 20, 25 or more) from the N-terminus of SEQ ID NO: 161 while retaining at least one epitope of SEQ ID NO: 161. Other fragments omit one or more protein domains. Immunogenic fragments of IC127 are identified in table 1 of reference 10.

[0593] IC128

[0594] IC128 is annotated in reference 10 as a hypothetical protein. For reference purposes, the amino acid sequence of full length IC128 is SEQ ID NO: 162 herein. In the R6 genome IC128 is spr0641 [84]. The use of IC128 for immunisation is reported in reference 10 (SEQ ID NO: 284 therein).

[0595] Preferred IC128 polypeptides for use with the invention comprise an amino acid sequence: (a) having 50% or more identity (e.g. 60%, 65%, 70%, 75%, 80%, 85%, 90%, 91%, 92%, 93%, 94%, 95%, 96%, 97%, 98%, 99%, 99.5% or more) to SEQ ID NO: 162; and/or (b) comprising a fragment of at least ‘n’ consecutive amino acids of SEQ ID NO: 162, wherein ‘n’ is 7 or more (e.g. 8, 10, 12, 14, 16, 18, 20, 25, 30, 35, 40, 50, 60, 70, 80, 90, 100, 150, 200, 250 or more). These IC128 proteins include variants of SEQ ID NO: 162. Preferred fragments of (b) comprise an epitope from SEQ ID NO: 162. Other preferred fragments lack one or more amino acids (e.g. 1, 2, 3, 4, 5, 6, 7, 8, 9, 10, 15, 20, 25 or more) from the C-terminus and/or one or more amino acids (e.g. 1, 2, 3, 4, 5, 6, 7, 8, 9, 10, 15, 20, 25 or more) from the N-terminus of SEQ ID NO: 162 while retaining at least one epitope of SEQ ID NO: 162. Other fragments omit one or more protein domains. Immunogenic fragments of IC128 are identified in table 1 of reference 10.

[0596] IC129

[0597] IC129 is annotated in reference 10 as a hypothetical protein. For reference purposes, the amino acid sequence of full length IC129 is SEQ ID NO: 163 herein. In the R6 genome IC129 is spr1205 [84]. The use of IC129 for immunisation is reported in reference 10 (SEQ ID NO: 285 therein).

[0598] Preferred IC129 polypeptides for use with the invention comprise an amino acid sequence: (a) having 50% or more identity (e.g. 60%, 65%, 70%, 75%, 80%, 85%, 90%, 91%, 92%, 93%, 94%, 95%, 96%, 97%, 98%, 99%, 99.5% or more) to SEQ ID NO: 163; and/or (b) comprising a fragment of at least ‘n’ consecutive amino acids of SEQ ID NO: 163, wherein ‘n’ is 7 or more (e.g. 8, 10, 12, 14, 16, 18, 20, 25, 30, 35, 40, 50, 60, 70, 80, 90, 100, 150, 200, 250 or more). These IC129 proteins include variants of SEQ ID NO: 163. Preferred fragments of (b) comprise an epitope from SEQ ID NO: 163. Other preferred fragments lack one or more amino acids (e.g. 1, 2, 3, 4, 5, 6, 7, 8, 9, 10, 15, 20, 25 or more) from the C-terminus and/or one or more amino acids (e.g. 1, 2, 3, 4, 5, 6, 7, 8, 9, 10, 15, 20, 25 or more) from the N-terminus of SEQ ID NO: 163 while retaining at least one epitope of SEQ ID NO: 163. Other fragments omit one or more protein domains. Immunogenic fragments of IC129 are identified in table 1 of reference 10.

[0599] IC130

[0600] IC130 is annotated in reference 10 as a hypothetical protein. For reference purposes, the amino acid sequence of full length IC130 is SEQ ID NO: 164 herein. In the R6 genome IC130 is spr1841 [84]. The use of IC130 for immunisation is reported in reference 10 (SEQ ID NO: 286 therein).

[0601] Preferred IC130 polypeptides for use with the invention comprise an amino acid sequence: (a) having 50% or more identity (e.g. 60%, 65%, 70%, 75%, 80%, 85%, 90%, 91%, 92%, 93%, 94%, 95%, 96%, 97%, 98%, 99%, 99.5% or more) to SEQ ID NO: 164; and/or (b) comprising a fragment of at least ‘n’ consecutive amino acids of SEQ ID NO: 164, wherein ‘n’ is 7 or more (e.g. 8, 10, 12, 14, 16, 18, 20, 25, 30, 35, 40, 50, 60, 70, 80, 90, 100, 150, 200, 250 or more). These IC130 proteins include variants of SEQ ID NO: 164. Preferred fragments of (b) comprise an epitope from SEQ ID NO: 164. Other preferred fragments lack one or more amino acids (e.g. 1, 2, 3, 4, 5, 6, 7, 8, 9, 10, 15, 20, 25 or more) from the C-terminus and/or one or more amino acids (e.g. 1, 2, 3, 4, 5, 6, 7, 8, 9, 10, 15, 20, 25 or more) from the N-terminus of SEQ ID NO: 164 while retaining at least one epitope of SEQ ID NO: 164. Other fragments omit one or more protein domains. Immunogenic fragments of IC130 are identified in table 1 of reference 10.

[0602] IC131

[0603] IC131 is annotated in reference 10 as a hypothetical protein. For reference purposes, the amino acid sequence of full length IC131 is SEQ ID NO: 165 herein. In the R6 genome IC131 is spr1777 [84]. The use of IC131 for immunisation is reported in reference 10 (SEQ ID NO: 287 therein).

[0604] Preferred IC131 polypeptides for use with the invention comprise an amino acid sequence: (a) having 50% or more identity (e.g. 60%, 65%, 70%, 75%, 80%, 85%, 90%, 91%, 92%, 93%, 94%, 95%, 96%, 97%, 98%, 99%, 99.5% or more) to SEQ ID NO: 165; and/or (b) comprising a fragment of at least ‘n’ consecutive amino acids of SEQ ID NO: 165, wherein ‘n’ is 7 or more (e.g. 8, 10, 12, 14, 16, 18, 20, 25, 30, 35, 40, 50, 60, 70, 80, 90, 100, 150, 200, 250 or more). These IC131 proteins include variants of SEQ ID NO: 165. Preferred fragments of (b) comprise an epitope from SEQ ID NO: 165. Other preferred fragments lack one or more amino acids (e.g. 1, 2, 3, 4, 5, 6, 7, 8, 9, 10, 15, 20, 25 or more) from the C-terminus and/or one or more amino acids (e.g. 1, 2, 3, 4, 5, 6, 7, 8, 9, 10, 15, 20, 25 or more) from the N-terminus of SEQ ID NO: 165 while retaining at least one epitope of SEQ ID NO: 165. Other fragments omit one or more protein domains. Immunogenic fragments of IC131 are identified in table 1 of reference 10.

[0605] spr0222

[0606] The original ‘spr0222’ sequence was annotated in reference 228 as ‘ABC transporter ATP-binding protein-iron transport’ (see GI:15457768). For reference purposes, the amino acid sequence of full length spr0222 as found in the R6 strain is given as SEQ ID NO: 121 herein. Its use in immunisation is suggested in reference 5.

[0607] Preferred spr0222 polypeptides for use with the invention comprise an amino acid sequence: (a) having 50% or more identity (e.g. 60%, 65%, 70%, 75%, 80%, 85%, 90%, 91%, 92%, 93%, 94%, 95%, 96%, 97%, 98%, 99%, 99.5% or more) to SEQ ID NO: 121; and/or (b) comprising a fragment of at least ‘n’ consecutive amino acids of SEQ ID NO: 121, wherein ‘n’ is 7 or more (e.g. 8, 10, 12, 14, 16, 18, 20, 25, 30, 35, 40, 50, 60, 70, 80, 90, 100, 150, 200, 250 or more). These spr022 proteins include variants of SEQ ID NO: 121. Preferred fragments of (b) comprise an epitope from SEQ ID NO: 121. Other preferred fragments lack one or more amino acids (e.g. 1, 2, 3, 4, 5, 6, 7, 8, 9, 10, 15, 20, 25 or more) from the C-terminus and/or one or more amino acids (e.g. 1, 2, 3, 4, 5, 6, 7, 8, 9, 10, 15, 20, 25 or more) from the N-terminus of SEQ ID NO: 121 while retaining at least one epitope of SEQ ID NO: 121. Other fragments omit one or more protein domains.

[0608] CbiO

[0609] CbiO is annotated as a cobalt transporter ATP-binding subunit. For reference purposes, the amino acid sequence of full length CbiO is SEQ ID NO: 167 herein. In the R6 genome CbiO is spr2025 [84]. The use of CbiO for immunisation is reported in reference 6 (‘ID2’ therein).

[0610] Preferred CbiO polypeptides for use with the invention comprise an amino acid sequence: (a) having 50% or more identity (e.g. 60%, 65%, 70%, 75%, 80%, 85%, 90%, 91%, 92%, 93%, 94%, 95%, 96%, 97%, 98%, 99%, 99.5% or more) to SEQ ID NO: 167; and/or (b) comprising a fragment of at least ‘n’ consecutive amino acids of SEQ ID NO: 167, wherein ‘n’ is 7 or more (e.g. 8, 10, 12, 14, 16, 18, 20, 25, 30, 35, 40, 50, 60, 70, 80, 90, 100, 150, 200, 250 or more). These CbiO proteins include variants of SEQ ID NO: 167. Preferred fragments of (b) comprise an epitope from SEQ ID NO: 167. Other preferred fragments lack one or more amino acids (e.g. 1, 2, 3, 4, 5, 6, 7, 8, 9, 10, 15, 20, 25 or more) from the C-terminus and/or one or more amino acids (e.g. 1, 2, 3, 4, 5, 6, 7, 8, 9, 10, 15, 20, 25 or more) from the N-terminus of SEQ ID NO: 167 while retaining at least one epitope of SEQ ID NO: 167. Other fragments omit one or more protein domains.

[0611] 30S Ribosomal Protein S8

[0612] For reference purposes, the amino acid sequence of 30S ribosomal protein S8 is SEQ ID NO: 168 herein. In the R6 genome the S8 subunit is spr0203 [84].

[0613] Preferred S8 polypeptides for use with the invention comprise an amino acid sequence: (a) having 50% or more identity (e.g. 60%, 65%, 70%, 75%, 80%, 85%, 90%, 91%, 92%, 93%, 94%, 95%, 96%, 97%, 98%, 99%, 99.5% or more) to SEQ ID NO: 168; and/or (b) comprising a fragment of at least ‘n’ consecutive amino acids of SEQ ID NO: 168, wherein ‘n’ is 7 or more (e.g. 8, 10, 12, 14, 16, 18, 20, 25, 30, 35, 40, 50, 60, 70, 80, 90, 100, 150, 200, 250 or more). These S8 proteins include variants of SEQ ID NO: 168. Preferred fragments of (b) comprise an epitope from SEQ ID NO: 168. Other preferred fragments lack one or more amino acids (e.g. 1, 2, 3, 4, 5, 6, 7, 8, 9, 10, 15, 20, 25 or more) from the C-terminus and/or one or more amino acids (e.g. 1, 2, 3, 4, 5, 6, 7, 8, 9, 10, 15, 20, 25 or more) from the N-terminus of SEQ ID NO: 168 while retaining at least one epitope of SEQ ID NO: 168. Other fragments omit one or more protein domains.

[0614] RrgA

[0615] RrgA is one of the surface subunits of the pneumococcal pilus [79,80] and is an important adhesin [81].There are at least two allelic forms of RrgA and, for reference purposes, their amino acid sequences are SEQ ID NOs: 172 and 179 herein. The two alleles are well conserved at their N- and C-termini but deviate in between.

[0616] Preferred RrgA polypeptides for use with the invention comprise an amino acid sequence: (a) having 50% or more identity (e.g. 60%, 65%, 70%, 75%, 80%, 85%, 90%, 91%, 92%, 93%, 94%, 95%, 96%, 97%, 98%, 99%, 99.5% or more) to SEQ ID NO: 172; and/or (b) comprising a fragment of at least ‘n’ consecutive amino acids of SEQ ID NO: 172, wherein ‘n’ is 7 or more (e.g. 8, 10, 12, 14, 16, 18, 20, 25, 30, 35, 40, 50, 60, 70, 80, 90, 100, 150, 200, 250 or more). These RrgA proteins include variants of SEQ ID NO: 172. Preferred fragments of (b) comprise an epitope from SEQ ID NO: 172. Other preferred fragments lack one or more amino acids (e.g. 1, 2, 3, 4, 5, 6, 7, 8, 9, 10, 15, 20, 25 or more) from the C-terminus and/or one or more amino acids (e.g. 1, 2, 3, 4, 5, 6, 7, 8, 9, 10, 15, 20, 25 or more) from the N-terminus of SEQ ID NO: 172 while retaining at least one epitope of SEQ ID NO: 172. Other fragments omit one or more protein domains. One suitable fragment is SEQ ID NO: 192, which omits the natural leader peptide and sortase recognition sequences.

[0617] Other preferred RrgA polypeptides for use with the invention comprise an amino acid sequence: (a) having 50% or more identity (e.g. 60%, 65%, 70%, 75%, 80%, 85%, 90%, 91%, 92%, 93%, 94%, 95%, 96%, 97%, 98%, 99%, 99.5% or more) to SEQ ID NO: 179; and/or (b) comprising a fragment of at least ‘n’ consecutive amino acids of SEQ ID NO: 179, wherein ‘n’ is 7 or more (e.g. 8, 10, 12, 14, 16, 18, 20, 25, 30, 35, 40, 50, 60, 70, 80, 90, 100, 150, 200, 250 or more). These RrgA proteins include variants of SEQ ID NO: 179. Preferred fragments of (b) comprise an epitope from SEQ ID NO: 179. Other preferred fragments lack one or more amino acids (e.g. 1, 2, 3, 4, 5, 6, 7, 8, 9, 10, 15, 20, 25 or more) from the C-terminus and/or one or more amino acids (e.g. 1, 2, 3, 4, 5, 6, 7, 8, 9, 10, 15, 20, 25 or more) from the N-terminus of SEQ ID NO: 179 while retaining at least one epitope of SEQ ID NO: 179. Other fragments omit one or more protein domains. One suitable fragment is SEQ ID NO: 191, which omits the natural leader peptide and sortase recognition sequences.

[0618] RrgB

[0619] RrgB is one of the surface subunits of the pneumococcal pilus [79,80]. There are at least three allelic forms of RrgB and, for reference purposes, their amino acid sequences are SEQ ID NOs: 173, 174 and 175 herein. The three alleles are well conserved at their N- and C-termini but deviate in between.

[0620] Preferred RrgB polypeptides for use with the invention comprise an amino acid sequence: (a) having 50% or more identity (e.g. 60%, 65%, 70%, 75%, 80%, 85%, 90%, 91%, 92%, 93%, 94%, 95%, 96%, 97%, 98%, 99%, 99.5% or more) to SEQ ID NO: 173; and/or (b) comprising a fragment of at least ‘n’ consecutive amino acids of SEQ ID NO: 173, wherein ‘n’ is 7 or more (e.g. 8, 10, 12, 14, 16, 18, 20, 25, 30, 35, 40, 50, 60, 70, 80, 90, 100, 150, 200, 250 or more). These RrgB proteins include variants of SEQ ID NO: 173. Preferred fragments of (b) comprise an epitope from SEQ ID NO: 173. Other preferred fragments lack one or more amino acids (e.g. 1, 2, 3, 4, 5, 6, 7, 8, 9, 10, 15, 20, 25 or more) from the C-terminus and/or one or more amino acids (e.g. 1, 2, 3, 4, 5, 6, 7, 8, 9, 10, 15, 20, 25 or more) from the N-terminus of SEQ ID NO: 173 while retaining at least one epitope of SEQ ID NO: 173. Other fragments omit one or more protein domains.

[0621] Other preferred RrgB polypeptides for use with the invention comprise an amino acid sequence: (a) having 50% or more identity (e.g. 60%, 65%, 70%, 75%, 80%, 85%, 90%, 91%, 92%, 93%, 94%, 95%, 96%, 97%, 98%, 99%, 99.5% or more) to SEQ ID NO: 174; and/or (b) comprising a fragment of at least ‘n’ consecutive amino acids of SEQ ID NO: 174, wherein ‘n’ is 7 or more (e.g. 8, 10, 12, 14, 16, 18, 20, 25, 30, 35, 40, 50, 60, 70, 80, 90, 100, 150, 200, 250 or more). These RrgB proteins include variants of SEQ ID NO: 174. Preferred fragments of (b) comprise an epitope from SEQ ID NO: 174. Other preferred fragments lack one or more amino acids (e.g. 1, 2, 3, 4, 5, 6, 7, 8, 9, 10, 15, 20, 25 or more) from the C-terminus and/or one or more amino acids (e.g. 1, 2, 3, 4, 5, 6, 7, 8, 9, 10, 15, 20, 25 or more) from the N-terminus of SEQ ID NO: 174 while retaining at least one epitope of SEQ ID NO: 174. Other fragments omit one or more protein domains.

[0622] Other preferred RrgB polypeptides for use with the invention comprise an amino acid sequence: (a) having 50% or more identity (e.g. 60%, 65%, 70%, 75%, 80%, 85%, 90%, 91%, 92%, 93%, 94%, 95%, 96%, 97%, 98%, 99%, 99.5% or more) to SEQ ID NO: 175; and/or (b) comprising a fragment of at least ‘n’ consecutive amino acids of SEQ ID NO: 175, wherein ‘n’ is 7 or more (e.g. 8, 10, 12, 14, 16, 18, 20, 25, 30, 35, 40, 50, 60, 70, 80, 90, 100, 150, 200, 250 or more). These RrgB proteins include variants of SEQ ID NO: 175. Preferred fragments of (b) comprise an epitope from SEQ ID NO: 175. Other preferred fragments lack one or more amino acids (e.g. 1, 2, 3, 4, 5, 6, 7, 8, 9, 10, 15, 20, 25 or more) from the C-terminus and/or one or more amino acids (e.g. 1, 2, 3, 4, 5, 6, 7, 8, 9, 10, 15, 20, 25 or more) from the N-terminus of SEQ ID NO: 175 while retaining at least one epitope of SEQ ID NO: 175. Other fragments omit one or more protein domains.

[0623] RrgC

[0624] RrgC is one of the surface subunits of the pneumococcal pilus [79,80]. For reference purposes, the amino acid sequence of RrgC is SEQ ID NO: 176 herein.

[0625] Preferred RrgC polypeptides for use with the invention comprise an amino acid sequence: (a) having 50% or more identity (e.g. 60%, 65%, 70%, 75%, 80%, 85%, 90%, 91%, 92%, 93%, 94%, 95%, 96%, 97%, 98%, 99%, 99.5% or more) to SEQ ID NO: 176; and/or (b) comprising a fragment of at least ‘n’ consecutive amino acids of SEQ ID NO: 176, wherein ‘n’ is 7 or more (e.g. 8, 10, 12, 14, 16, 18, 20, 25, 30, 35, 40, 50, 60, 70, 80, 90, 100, 150, 200, 250 or more). These RrgC proteins include variants of SEQ ID NO: 176. Preferred fragments of (b) comprise an epitope from SEQ ID NO: 176. Other preferred fragments lack one or more amino acids (e.g. 1, 2, 3, 4, 5, 6, 7, 8, 9, 10, 15, 20, 25 or more) from the C-terminus and/or one or more amino acids (e.g. 1, 2, 3, 4, 5, 6, 7, 8, 9, 10, 15, 20, 25 or more) from the N-terminus of SEQ ID NO: 176 while retaining at least one epitope of SEQ ID NO: 176. Other fragments omit one or more protein domains.

[0626] Hybrid Polypeptides

[0627] Pneumococcal antigens used in the invention may be present in the composition as individual separate polypeptides. Where more than one antigen is used, however, they do not have to be present as separate polypeptides. Instead, at least two (e.g. 2, 3, 4, 5, or more) antigens can be expressed as a single polypeptide chain (a ‘hybrid’ polypeptide). Hybrid polypeptides offer two main advantages: first, a polypeptide that may be unstable or poorly expressed on its own can be assisted by adding a suitable hybrid partner that overcomes the problem; second, commercial manufacture is simplified as only one expression and purification need be employed in order to produce two polypeptides which are both antigenically useful.

[0628] The hybrid polypeptide may comprise two or more polypeptide sequences from the first antigen group. The hybrid polypeptide may comprise one or more polypeptide sequences from the first antigen group and one or more polypeptide sequences from the second antigen group. The hybrid polypeptide may comprise one or more polypeptide sequences from the first antigen group and one or more polypeptide sequences from the third antigen group. The hybrid polypeptide may comprise one or more polypeptide sequences from the second antigen group and one or more polypeptide sequences from the third antigen group. The hybrid polypeptide may comprise two or more polypeptide sequences from the seventh antigen group. The hybrid polypeptide may comprise two or more polypeptide sequences from the eighth antigen group. The hybrid polypeptide may comprise two or more polypeptide sequences from the ninth antigen group. The hybrid polypeptide may comprise two or more polypeptide sequences from the tenth antigen group. Moreover, the hybrid polypeptide may comprise two or more polypeptide sequences from each of the antigens listed above, or two or more variants of the same antigen in the cases in which the sequence has partial variability across strains.

[0629] Hybrids consisting of amino acid sequences from two, three, four, five, six, seven, eight, nine, or ten pneumococcal antigens are useful. In particular, hybrids consisting of amino acid sequences from two, three, four, or five pneumococcal antigens are preferred, such as two or three pneumococcal antigens.

[0630] Different hybrid polypeptides may be mixed together in a single formulation. Hybrids may be combined with non-hybrid antigens selected from the first, second or third antigen groups. Within such combinations, a pneumococcal antigen may be present in more than one hybrid polypeptide and/or as a non-hybrid polypeptide. It is preferred, however, that an antigen is present either as a hybrid or as a non-hybrid, but not as both.

[0631] The hybrid polypeptides can also be combined with conjugates or non-pneumococcal antigens as described above.

[0632] Hybrid polypeptides can be represented by the formula NH₂-A-{-X-L-}ₙ-B—COOH, wherein: X is an amino acid sequence of a pneumococcal antigen, as described above; L is an optional linker amino acid sequence; A is an optional N-terminal amino acid sequence; B is an optional C-terminal amino acid sequence; 17 is an integer of 2 or more (e.g. 2, 3, 4, 5, 6, etc.). Usually n is 2 or 3.

[0633] If a —X— moiety has a leader peptide sequence in its wild-type form, this may be included or omitted in the hybrid protein. In some embodiments, the leader peptides will be deleted except for that of the —X— moiety located at the N-terminus of the hybrid protein i.e. the leader peptide of X₁ will be retained, but the leader peptides of X₂ . . . Xₙ will be omitted. This is equivalent to deleting all leader peptides and using the leader peptide of X₁ as moiety -A-.

[0634] For each n instances of {-X-L-}, linker amino acid sequence -L- may be present or absent. For instance, when n=2 the hybrid may be NH₂—X₁-L₁-X₂-L₂-COOH, NH₂—X₁—X₂—COOH, NH₂—X₁-L₁-X₂—COOH, NH₂—X₁—X₂-L₂-COOH, etc. Linker amino acid sequence(s)-L- will typically be short (e.g. 20 or fewer amino acids i.e. 20, 19, 18, 17, 16, 15, 14, 13, 12, 11, 10, 9, 8, 7, 6, 5, 4, 3, 2, 1). Examples comprise short peptide sequences which facilitate cloning, poly-glycine linkers (i.e. comprising Glyₙ where n=2, 3, 4, 5, 6, 7, 8, 9, 10 or more), and histidine tags (i.e. Hisₙ where n=3, 4, 5, 6, 7, 8, 9, 10 or more). Other suitable linker amino acid sequences will be apparent to those skilled in the art. A useful linker is GSGGGG (SEQ ID NO:232) or GSGSGGGG (SEQ ID NO:233), with the Gly-Ser dipeptide being formed from a BamHI restriction site, thus aiding cloning and manipulation, and the (Gly)₄ tetrapeptide being a typical poly-glycine linker. Other suitable linkers, particularly for use as the final Lₙ are a Leu-Glu dipeptide or SEQ ID NO: 235.

[0635] -A- is an optional N-terminal amino acid sequence. This will typically be short (e.g. 40 or fewer amino acids i.e. 40, 39, 38, 37, 36, 35, 34, 33, 32, 31, 30, 29, 28, 27, 26, 25, 24, 23, 22, 21, 20, 19, 18, 17, 16, 15, 14, 13, 12, 11, 10, 9, 8, 7, 6, 5, 4, 3, 2, 1). Examples include leader sequences to direct protein trafficking, or short peptide sequences which facilitate cloning or purification (e.g. histidine tags i.e. Hisₙ where n=3, 4, 5, 6, 7, 8, 9, 10 or more). Other suitable N-terminal amino acid sequences will be apparent to those skilled in the art. If X₁ lacks its own N-terminus methionine, -A- is preferably an oligopeptide (e.g. with 1, 2, 3, 4, 5, 6, 7 or 8 amino acids) which provides a N-terminus methionine e.g. Met-Ala-Ser, or a single Met residue.

[0636] —B— is an optional C-terminal amino acid sequence. This will typically be short (e.g. 40 or fewer amino acids i.e. 39, 38, 37, 36, 35, 34, 33, 32, 31, 30, 29, 28, 27, 26, 25, 24, 23, 22, 21, 20, 19, 18, 17, 16, 15, 14, 13, 12, 11, 10, 9, 8, 7, 6, 5, 4, 3, 2, 1). Examples include sequences to direct protein trafficking, short peptide sequences which facilitate cloning or purification (e.g. comprising histidine tags i.e. Hisₙ where n=3, 4, 5, 6, 7, 8, 9, 10 or more, such as SEQ ID NO: 234), or sequences which enhance protein stability. Other suitable C-terminal amino acid sequences will be apparent to those skilled in the art.

[0637] Examples of hybrids include polypeptides that comprise an amino acid sequence selected from the group consisting of: spr2021-spr0057 (e.g. SEQ ID NO: 193); spr2021-spr0096 (e.g. SEQ ID NO: 194); spr2021-spr0565 (e.g. SEQ ID NO: 195 or SEQ ID NO: 196 or SEQ ID NO: 197); spr2021-RrgA (e.g. SEQ ID NO: 198); spr0057-spr2021 (e.g. SEQ ID NO: 199); spr0057-spr0096 (e.g. SEQ ID NO: 200); spr0057-RrgA (e.g. SEQ ID NO: 201); spr0057-spr0565 (e.g. SEQ ID NO: 202 or SEQ ID NO: 203 or SEQ ID NO: 204); spr0096-spr2021 (e.g. SEQ ID NO: 205); spr0096-spr0057 (e.g. SEQ ID NO: 206); spr0096-RrgA (e.g. SEQ ID NO: 207); spr0096-spr0565 (e.g. SEQ ID NO: 208 or SEQ ID NO: 209 or SEQ ID NO: 210); RrgA-spr2021 (e.g. SEQ ID NO: 211); RrgA-spr0565 (e.g. SEQ ID NO: 212 or SEQ ID NO: 213 or SEQ ID NO: 214); RrgA-spr0057 (e.g. SEQ ID NO: 215); RrgA-spr0096 (e.g. SEQ ID NO: 216); spr0565-spr0057 (e.g. SEQ ID NO: 217 or SEQ ID NO: 218 or SEQ ID NO: 219); spr0565-spr0096 (e.g. SEQ ID NO: 220 or SEQ ID NO: 221 or SEQ ID NO: 222); spr0565-spr2021 (e.g. SEQ ID NO: 223 or SEQ ID NO: 224 or SEQ ID NO: 225); or spr0565-RrgA (e.g. SEQ ID NO: 226 or SEQ ID NO: 227 or SEQ ID NO: 228).

[0638] Polypeptides Used with the Invention

[0639] Polypeptides used with the invention can take various forms (e.g. native, fusions, glycosylated, non-glycosylated, lipidated, non-lipidated, phosphorylated, non-phosphorylated, myristoylated, non-myristoylated, monomeric, multimeric, particulate, denatured, etc.).

[0640] Polypeptides used with the invention can be prepared by various means (e.g. recombinant expression, purification from cell culture, chemical synthesis, etc.). Recombinantly-expressed proteins are preferred, particularly for hybrid polypeptides.

[0641] Polypeptides used with the invention are preferably provided in purified or substantially purified form i.e. substantially free from other polypeptides (e.g. free from naturally-occurring polypeptides), particularly from other streptococcal or host cell polypeptides, and are generally at least about 50% pure (by weight), and usually at least about 90% pure i.e. less than about 50%, and more preferably less than about 10% (e.g. 5%) of a composition is made up of other expressed polypeptides. Thus the antigens in the compositions are separated from the whole organism with which the molecule is expressed.

[0642] Polypeptides used with the invention are preferably pneumococcal polypeptides.

[0643] The term “polypeptide” refers to amino acid polymers of any length. The polymer may be linear or branched, it may comprise modified amino acids, and it may be interrupted by non-amino acids. The terms also encompass an amino acid polymer that has been modified naturally or by intervention; for example, disulfide bond formation, glycosylation, lipidation, acetylation, phosphorylation, or any other manipulation or modification, such as conjugation with a labeling component. Also included are, for example, polypeptides containing one or more analogs of an amino acid (including, for example, unnatural amino acids, etc.), as well as other modifications known in the art. Polypeptides can occur as single chains or associated chains.

[0644] The invention provides polypeptides comprising a sequence —P-Q- or -Q-P—, wherein: —P— is an amino acid sequence as defined above and -Q- is not a sequence as defined above i.e. the invention provides fusion proteins. Where the N-terminus codon of —P— is not ATG, but this codon is not present at the N-terminus of a polypeptide, it will be translated as the standard amino acid for that codon rather than as a Met. Where this codon is at the N-terminus of a polypeptide, however, it will be translated as Met. Examples of -Q- moieties include, but are not limited to, histidine tags (i.e. Hisₙ where n=3, 4, 5, 6, 7, 8, 9, 10 or more), maltose-binding protein, or glutathione-S-transferase (GST).

[0645] The invention also provides a process for producing a polypeptide of the invention, comprising the step of culturing a host cell transformed with nucleic acid of the invention under conditions which induce polypeptide expression.

[0646] Although expression of the polypeptides of the invention may take place in a Streptococcus, the invention will usually use a heterologous host for expression (recombinant expression). The heterologous host may be prokaryotic (e.g. a bacterium) or eukaryotic. It may be E. coli, but other suitable hosts include Bacillus subtilis, Vibrio cholerae, Salmonella typhi, Salmonella typhimurium, Neisseria lactamica, Neisseria cinerea, Mycobacteria (e.g. M. tuberculosis), yeasts, etc. Compared to the wild-type pneumococcal genes encoding polypeptides of the invention, it is helpful to change codons to optimise expression efficiency in such hosts without affecting the encoded amino acids.

[0647] The invention provides a process for producing a polypeptide of the invention, comprising the step of synthesising at least part of the polypeptide by chemical means.

[0648] Nucleic Acids

[0649] The invention also provides nucleic acid encoding polypeptides and hybrid polypeptides of the invention. It also provides nucleic acid comprising a nucleotide sequence that encodes one or more polypeptides or hybrid polypeptides of the invention.

[0650] The invention also provides nucleic acid comprising nucleotide sequences having sequence identity to such nucleotide sequences. Identity between sequences is preferably determined by the Smith-Waterman homology search algorithm as described above. Such nucleic acids include those using alternative codons to encode the same amino acid.

[0651] The invention also provides nucleic acid which can hybridize to these nucleic acids. Hybridization reactions can be performed under conditions of different “stringency”. Conditions that increase stringency of a hybridization reaction of widely known and published in the art (e.g. page 7.52 of reference 288). Examples of relevant conditions include (in order of increasing stringency): incubation temperatures of 25° C., 37° C., 50° C., 55° C. and 68° C.; buffer concentrations of 10×SSC, 6×SSC, 1×SSC, 0.1×SSC (where SSC is 0.15 M NaCl and 15 mM citrate buffer) and their equivalents using other buffer systems; formamide concentrations of 0%, 25%, 50%, and 75%; incubation times from 5 minutes to 24 hours; 1, 2, or more washing steps; wash incubation times of 1, 2, or 15 minutes; and wash solutions of 6×SSC, 1×SSC, 0.1×SSC, or de-ionized water. Hybridization techniques and their optimization are well known in the art (e.g. see refs 82, 83, 288, 290, etc.].

[0652] In some embodiments, nucleic acid of the invention hybridizes to a target under low stringency conditions; in other embodiments it hybridizes under intermediate stringency conditions; in preferred embodiments, it hybridizes under high stringency conditions. An exemplary set of low stringency hybridization conditions is 50° C. and 10×SSC. An exemplary set of intermediate stringency hybridization conditions is 55° C. and 1×SSC. An exemplary set of high stringency hybridization conditions is 68° C. and 0.1×SSC.

[0653] The invention includes nucleic acid comprising sequences complementary to these sequences (e.g. for antisense or probing, or for use as primers).

[0654] Nucleic acids of the invention can be used in hybridisation reactions (e.g. Northern or Southern blots, or in nucleic acid microarrays or ‘gene chips’) and amplification reactions (e.g. PCR, SDA, SSSR, LCR, TMA, NASBA, etc.) and other nucleic acid techniques.

[0655] Nucleic acid according to the invention can take various forms (e.g. single-stranded, double-stranded, vectors, primers, probes, labelled etc.). Nucleic acids of the invention may be circular or branched, but will generally be linear. Unless otherwise specified or required, any embodiment of the invention that utilizes a nucleic acid may utilize both the double-stranded form and each of two complementary single-stranded forms which make up the double-stranded form. Primers and probes are generally single-stranded, as are antisense nucleic acids.

[0656] Nucleic acids of the invention are preferably provided in purified or substantially purified form i.e. substantially free from other nucleic acids (e.g. free from naturally-occurring nucleic acids), particularly from other pneumococcal or host cell nucleic acids, generally being at least about 50% pure (by weight), and usually at least about 90% pure. Nucleic acids of the invention are preferably pneumococcal nucleic acids.

[0657] Nucleic acids of the invention may be prepared in many ways e.g. by chemical synthesis (e.g. phosphoramidite synthesis of DNA) in whole or in part, by digesting longer nucleic acids using nucleases (e.g. restriction enzymes), by joining shorter nucleic acids or nucleotides (e.g. using ligases or polymerases), from genomic or cDNA libraries, etc.

[0658] Nucleic acid of the invention may be attached to a solid support (e.g. a bead, plate, filter, film, slide, microarray support, resin, etc.). Nucleic acid of the invention may be labelled e.g. with a radioactive or fluorescent label, or a biotin label. This is particularly useful where the nucleic acid is to be used in detection techniques e.g. where the nucleic acid is a primer or as a probe.

[0659] The term “nucleic acid” includes in general means a polymeric form of nucleotides of any length, which contain deoxyribonucleotides, ribonucleotides, and/or their analogs. It includes DNA, RNA, DNA/RNA hybrids. It also includes DNA or RNA analogs, such as those containing modified backbones (e.g. peptide nucleic acids (PNAs) or phosphorothioates) or modified bases. Thus the invention includes mRNA, tRNA, rRNA, ribozymes, DNA, cDNA, recombinant nucleic acids, branched nucleic acids, plasmids, vectors, probes, primers, etc. Where nucleic acid of the invention takes the form of RNA, it may or may not have a 5′ cap.

[0660] Nucleic acids of the invention may be part of a vector i.e. part of a nucleic acid construct designed for transduction/transfection of one or more cell types. Vectors may be, for example, “cloning vectors” which are designed for isolation, propagation and replication of inserted nucleotides, “expression vectors” which are designed for expression of a nucleotide sequence in a host cell, “viral vectors” which is designed to result in the production of a recombinant virus or virus-like particle, or “shuttle vectors”, which comprise the attributes of more than one type of vector. Preferred vectors are plasmids. A “host cell” includes an individual cell or cell culture which can be or has been a recipient of exogenous nucleic acid. Host cells include progeny of a single host cell, and the progeny may not necessarily be completely identical (in morphology or in total DNA complement) to the original parent cell due to natural, accidental, or deliberate mutation and/or change. Host cells include cells transfected or infected in vivo or in vitro with nucleic acid of the invention.

[0661] Where a nucleic acid is DNA, it will be appreciated that “U” in a RNA sequence will be replaced by “T” in the DNA. Similarly, where a nucleic acid is RNA, it will be appreciated that “T” in a DNA sequence will be replaced by “U” in the RNA.

[0662] The term “complement” or “complementary” when used in relation to nucleic acids refers to Watson-Crick base pairing. Thus the complement of C is G, the complement of G is C, the complement of A is T (or U), and the complement of T (or U) is A. It is also possible to use bases such as I (the purine inosine) e.g. to complement pyrimidines (C or T).

[0663] Nucleic acids of the invention can be used, for example: to produce polypeptides; as hybridization probes for the detection of nucleic acid in biological samples; to generate additional copies of the nucleic acids; to generate ribozymes or antisense oligonucleotides; as single-stranded DNA primers or probes; or as triple-strand forming oligonucleotides.

[0664] The invention provides a process for producing nucleic acid of the invention, wherein the nucleic acid is synthesised in part or in whole using chemical means.

[0665] The invention provides vectors comprising nucleotide sequences of the invention (e.g. cloning or expression vectors) and host cells transformed with such vectors.

[0666] Nucleic acid amplification according to the invention may be quantitative and/or real-time.

[0667] For certain embodiments of the invention, nucleic acids are preferably at least 7 nucleotides in length (e.g. 8, 9, 10, 11, 12, 13, 14, 15, 16, 17, 18, 19, 20, 21, 22, 23, 24, 25, 26, 27, 28, 29, 30, 31, 32, 33, 34, 35, 36, 37, 38, 39, 40, 45, 50, 55, 60, 65, 70, 75, 80, 90, 100, 110, 120, 130, 140, 150, 160, 170, 180, 190, 200, 225, 250, 275, 300 nucleotides or longer).

[0668] For certain embodiments of the invention, nucleic acids are preferably at most 500 nucleotides in length (e.g. 450, 400, 350, 300, 250, 200, 150, 140, 130, 120, 110, 100, 90, 80, 75, 70, 65, 60, 55, 50, 45, 40, 39, 38, 37, 36, 35, 34, 33, 32, 31, 30, 29, 28, 27, 26, 25, 24, 23, 22, 21, 20, 19, 18, 17, 16, 15 nucleotides or shorter).

[0669] Primers and probes of the invention, and other nucleic acids used for hybridization, are preferably between 10 and 30 nucleotides in length (e.g. 10, 11, 12, 13, 14, 15, 16, 17, 18, 19, 20, 21, 22, 23, 24, 25, 26, 27, 28, 29, or 30 nucleotides).

[0670] Strains and Variants

[0671] Antigens are defined above by reference to “spr” nomenclature. This nomenclature refers to the numbering used in reference 84 for unique identification of open reading frames in the R6 strain of S. pneumoniae. The basic reference sequence for any “spr” number can easily be found in public gene databases. For instance, GenBank accession number NC_{—}003098 (GI:15902044) is the complete R6 genome sequence (2,038,615 bp), and the individual spr sequences are given as “locustag” entries in the genome sequence's “features” section. Thus the amino acid sequence for any given spr number, and its natural coding sequence, can be established unambiguously for strain R6. Functional annotations are also given in the databases.

[0672] The invention is not limited to sequences from the R6 strain. Genome sequences of several other strains of S. pneumoniae are available, including those of 23F [S5], 670 [86] and TIGR4 [87,88,89]. Standard search and alignment techniques can be used to identify in any of these (or other) further genome sequences the homolog of any particular spr sequence from R6. Moreover, the available R6 (and other) sequences can be used to design primers for amplification of homologous sequences from other strains. Thus the invention is not limited to R6 sequences, but rather encompasses such variants and homologs from other strains of S. pneumoniae, as well as non-natural variants. In general, suitable variants of a particular SEQ ID NO include its allelic variants, its polymorphic forms, its homologs, its orthologs, its paralogs, its mutants, etc.

[0673] Thus, for instance, polypeptides used with the invention may, compared to the R6 reference sequence, include one or more (e.g. 1, 2, 3, 4, 5, 6, 7, 8, 9, etc.) amino acid substitutions, such as conservative substitutions (i.e. substitutions of one amino acid with another which has a related side chain). Genetically-encoded amino acids are generally divided into four families: (1) acidic i.e. aspartate, glutamate; (2) basic i.e. lysine, arginine, histidine; (3) non-polar i.e. alanine, valine, leucine, isoleucine, proline, phenylalanine, methionine, tryptophan; and (4) uncharged polar i.e. glycine, asparagine, glutamine, cysteine, serine, threonine, tyrosine. Phenylalanine, tryptophan, and tyrosine are sometimes classified jointly as aromatic amino acids. In general, substitution of single amino acids within these families does not have a major effect on the biological activity. The polypeptides may also include one or more (e.g. 1, 2, 3, 4, 5, 6, 7, 8, 9, etc.) single amino acid deletions relative to the R6 sequences. The polypeptides may also include one or more (e.g. 1, 2, 3, 4, 5, 6, 7, 8, 9, etc.) insertions (e.g. each of 1, 2, 3, 4 or 5 amino acids) relative to the R6 sequences.

[0674] Similarly, a polypeptide used with the invention may comprise an amino acid sequence that:
[0675] (a) is identical (i.e. 100% identical) to a sequence disclosed in the sequence listing;
[0676] (b) shares sequence identity (e.g. 60%, 65%, 70%, 75%, 80%, 85%, 90%, 91%, 92%, 93%, 94%, 95%, 96%, 97%, 98%, 99%, 99.5% or more) with a sequence disclosed in the sequence listing;
[0677] (c) has 1, 2, 3, 4, 5, 6, 7, 8, 9 or 10 (or more) single amino acid alterations (deletions, insertions, substitutions), which may be at separate locations or may be contiguous, as compared to the sequences of (a) or (b); and
[0678] (d) when aligned with a particular sequence from the sequence listing using a pairwise alignment algorithm, each moving window of x amino acids from N-terminus to C-terminus (such that for an alignment that extends to p amino acids, where p>x, there are p−x+1 such windows) has at least xy identical aligned amino acids, where: x is selected from 20, 25, 30, 35, 40, 45, 50, 60, 70, 80, 90, 100, 150, 200; y is selected from 0.50, 0.60, 0.70, 0.75, 0.80, 0.85, 0.90, 0.91, 0.92, 0.93, 0.94, 0.95, 0.96, 0.97, 0.98, 0.99; and if xy is not an integer then it is rounded up to the nearest integer. The preferred pairwise alignment algorithm is the Needleman-Wunsch global alignment algorithm [90], using default parameters (e.g. with Gap opening penalty=10.0, and with Gap extension penalty=0.5, using the EBLOSUM62 scoring matrix). This algorithm is conveniently implemented in the needle tool in the EMBOSS package [91].

[0679] Where hybrid polypeptides are used, the individual antigens within the hybrid (i.e. individual —X— moieties) may be from one or more strains. Where n=2, for instance, X₂ may be from the same strain as X₁ or from a different strain. Where n=3, the strains might be (i) X₁═X₂═X₃ (ii) X₁═X₂≠X₃ (iii) X₁≠X₂═X₃ (iv) X₁≠X₂≠X₃ or (v) X₁═X₃≠X₂, etc.

[0680] Within group (c), deletions or substitutions may be at the N-terminus and/or C-terminus, or may be between the two termini. Thus a truncation is an example of a deletion. Truncations may involve deletion of up to 40 (or more) amino acids at the N-terminus and/or C-terminus.

[0681] In general, when a polypeptide of the invention comprises a sequence that is not identical to a complete pneumococcal sequence from the sequence listing (e.g. when it comprises a sequence listing with <100% sequence identity thereto, or when it comprises a fragment thereof) it is preferred in each individual instance that the polypeptide can elicit an antibody that recognises the complete pneumococcal sequence.

[0682] Mutant Bacteria

[0683] The invention also provides a pneumococcus in which one or more of the antigens from the various antigen groups of the invention has/have been knocked out. Techniques for producing knockout bacteria are well known, and knockout pneumococci have been reported. A knockout mutation may be situated in the coding region of the gene or may lie within its transcriptional control regions (e.g. within its promoter). A knockout mutation will reduce the level of mRNA encoding the antigen to <1% of that produced by the wild-type bacterium, preferably <0.5%, more preferably <0.1%, and most preferably to 0%.

[0684] The invention also provides a pneumococcus in which one or more of the antigens from the various antigen groups of the invention has a mutation which inhibits its activity. The gene encoding the antigen will have a mutation that changes the encoded amino acid sequence. Mutation may involve deletion, substitution, and/or insertion, any of which may be involve one or more amino acids.

[0685] Immunogenic Compositions and Medicaments

[0686] Immunogenic compositions of the invention may be useful as vaccines. Vaccines according to the invention may either be prophylactic (i.e. to prevent infection) or therapeutic (i.e. to treat infection), but will typically be prophylactic.

[0687] Compositions may thus be pharmaceutically acceptable. They will usually include components in addition to the antigens e.g. they typically include one or more pharmaceutical carriers) and/or excipient(s). A thorough discussion of such components is available in reference 285.

[0688] Compositions will generally be administered to a mammal in aqueous form. Prior to administration, however, the composition may have been in a non-aqueous form. For instance, although some vaccines are manufactured in aqueous form, then filled and distributed and administered also in aqueous form, other vaccines are lyophilised during manufacture and are reconstituted into an aqueous form at the time of use. Thus a composition of the invention may be dried, such as a lyophilised formulation.

[0689] The composition may include preservatives such as thiomersal or 2-phenoxyethanol. It is preferred, however, that the vaccine should be substantially free from (i.e. less than 5 μg/ml) mercurial material e.g. thiomersal-free. Vaccines containing no mercury are more preferred. Preservative-free vaccines are particularly preferred.

[0690] To improve thermal stability, a composition may include a temperature protective agent. Further details of such agents are provided below.

[0691] To control tonicity, it is preferred to include a physiological salt, such as a sodium salt. Sodium chloride (NaCl) is preferred, which may be present at between 1 and 20 mg/ml e.g. about 10±2 mg/ml NaCl. Other salts that may be present include potassium chloride, potassium dihydrogen phosphate, disodium phosphate dehydrate, magnesium chloride, calcium chloride, etc.

[0692] Compositions will generally have an osmolality of between 200 mOsm/kg and 400 mOsm/kg, preferably between 240-360 mOsm/kg, and will more preferably fall within the range of 290-310 mOsm/kg.

[0693] Compositions may include one or more buffers. Typical buffers include: a phosphate buffer; a Tris buffer; a borate buffer; a succinate buffer; a histidine buffer (particularly with an aluminum hydroxide adjuvant); or a citrate buffer. Buffers will typically be included in the 5-20 mM range.

[0694] The pH of a composition will generally be between 5.0 and 8.1, and more typically between 6.0 and 8.0 e.g. 6.5 and 7.5, or between 7.0 and 7.8.

[0695] The composition is preferably sterile. The composition is preferably non-pyrogenic e.g. containing <1 EU (endotoxin unit, a standard measure) per dose, and preferably <0.1 EU per dose. The composition is preferably gluten free.

[0696] The composition may include material for a single immunisation, or may include material for multiple immunisations (i.e. a ‘multidose’ kit). The inclusion of a preservative is preferred in multidose arrangements. As an alternative (or in addition) to including a preservative in multidose compositions, the compositions may be contained in a container having an aseptic adaptor for removal of material.

[0697] Human vaccines are typically administered in a dosage volume of about 0.5 ml, although a half dose (i.e. about 0.25 ml) may be administered to children.

[0698] Immunogenic compositions of the invention may also comprise one or more immunoregulatory agents. Preferably, one or more of the immunoregulatory agents include one or more adjuvants. The adjuvants may include a TH1 adjuvant and/or a TH2 adjuvant, further discussed below.

[0699] Adjuvants which may be used in compositions of the invention include, but are not limited to:

[0700] A. Mineral-Containing Compositions

[0701] Mineral containing compositions suitable for use as adjuvants in the invention include mineral salts, such as aluminium salts and calcium salts (or mixtures thereof). Calcium salts include calcium phosphate (e.g. the “CAP” particles disclosed in ref. 92). Aluminum salts include hydroxides, phosphates, sulfates, etc., with the salts taking any suitable form (e.g. gel, crystalline, amorphous, etc.). Adsorption to these salts is preferred. The mineral containing compositions may also be formulated as a particle of metal salt [93].

[0702] The adjuvants known as aluminum hydroxide and aluminum phosphate may be used. These names are conventional, but are used for convenience only, as neither is a precise description of the actual chemical compound which is present (e.g. see chapter 9 of reference 94)). The invention can use any of the “hydroxide” or “phosphate” adjuvants that are in general use as adjuvants. The adjuvants known as “aluminium hydroxide” are typically aluminium oxyhydroxide salts, which are usually at least partially crystalline. The adjuvants known as “aluminium phosphate” are typically aluminium hydroxyphosphates, often also containing a small amount of sulfate (i.e. aluminium hydroxyphosphate sulfate). They may be obtained by precipitation, and the reaction conditions and concentrations during precipitation influence the degree of substitution of phosphate for hydroxyl in the salt.

[0703] A fibrous morphology (e.g. as seen in transmission electron micrographs) is typical for aluminium hydroxide adjuvants. The pI of aluminium hydroxide adjuvants is typically about 11 i.e. the adjuvant itself has a positive surface charge at physiological pH. Adsorptive capacities of between 1.8-2.6 mg protein per mg Al⁺⁺⁺ at pH 7.4 have been reported for aluminium hydroxide adjuvants.

[0704] Aluminium phosphate adjuvants generally have a PO₄/Al molar ratio between 0.3 and 1.2, preferably between 0.8 and 1.2, and more preferably 0.95±0.1. The aluminium phosphate will generally be amorphous, particularly for hydroxyphosphate salts. A typical adjuvant is amorphous aluminium hydroxyphosphate with PO₄/Al molar ratio between 0.84 and 0.92, included at 0.6 mg Al³⁺/ml. The aluminium phosphate will generally be particulate (e.g. plate-like morphology as seen in transmission electron micrographs). Typical diameters of the particles are in the range 0.5-20 μm (e.g. about 5-10 μm) after any antigen adsorption. Adsorptive capacities of between 0.7-1.5 mg protein per mg Al⁺⁺⁺ at pH 7.4 have been reported for aluminium phosphate adjuvants.

[0705] The point of zero charge (PZC) of aluminium phosphate is inversely related to the degree of substitution of phosphate for hydroxyl, and this degree of substitution can vary depending on reaction conditions and concentration of reactants used for preparing the salt by precipitation. PZC is also altered by changing the concentration of free phosphate ions in solution (more phosphate=more acidic PZC) or by adding a buffer such as a histidine buffer (makes PZC more basic). Aluminium phosphates used according to the invention will generally have a PZC of between 4.0 and 7.0, more preferably between 5.0 and 6.5 e.g. about 5.7.

[0706] Suspensions of aluminium salts used to prepare compositions of the invention may contain a buffer (e.g. a phosphate or a histidine or a Tris buffer), but this is not always necessary. The suspensions are preferably sterile and pyrogen-free. A suspension may include free aqueous phosphate ions e.g. present at a concentration between 1.0 and 20 mM, preferably between 5 and 15 mM, and more preferably about 10 mM. The suspensions may also comprise sodium chloride.

[0707] The invention can use a mixture of both an aluminium hydroxide and an aluminium phosphate. In this case there may be more aluminium phosphate than hydroxide e.g. a weight ratio of at least 2:1 e.g. ≧5:1, ≧6:1, ≧7:1, ≧8:1, ≧9:1, etc.

[0708] The concentration of Al⁺⁺⁺ in a composition for administration to a patient is preferably less than 10 mg/ml e.g. ≦5 mg/ml, ≦4 mg/ml, ≦3 mg/ml, ≦2 mg/ml, ≦1 mg/ml, etc. A preferred range is between 0.3 and 1 mg/ml. A maximum of 0.85 mg/dose is preferred.

[0709] Aluminium phosphates are particularly preferred, particularly in compositions which include a H. influenzae saccharide antigen, and a typical adjuvant is amorphous aluminium hydroxyphosphate with PO₄/Al molar ratio between 0.84 and 0.92, included at 0.6 mg Al³⁺/ml. Adsorption with a low dose of aluminium phosphate may be used e.g. between 50 and 100 μg Al³⁺ per conjugate per dose. Where there is more than one conjugate in a composition, not all conjugates need to be adsorbed.

[0710] B. Oil Emulsions

[0711] Oil emulsion compositions suitable for use as adjuvants in the invention include squalene-water emulsions, such as MF59 [Chapter 10 of ref. 94; see also ref. 95] (5% Squalene, 0.5% Tween 80, and 0.5% Span 85, formulated into submicron particles using a microfluidizer). Complete Freund's adjuvant (CFA) and incomplete Freund's adjuvant (IFA) may also be used.

[0712] Various oil-in-water emulsion adjuvants are known, and they typically include at least one oil and at least one surfactant, with the oil(s) and surfactant(s) being biodegradable (metabolizable) and biocompatible. The oil droplets in the emulsion are generally less than 5 μm in diameter, and ideally have a sub-micron diameter, with these small sizes being achieved with a microfluidiser to provide stable emulsions. Droplets with a size less than 220 nm are preferred as they can be subjected to filter sterilization.

[0713] The emulsion can comprise oils such as those from an animal (such as fish) or vegetable source. Sources for vegetable oils include nuts, seeds and grains. Peanut oil, soybean oil, coconut oil, and olive oil, the most commonly available, exemplify the nut oils. Jojoba oil can be used e.g. obtained from the jojoba bean. Seed oils include safflower oil, cottonseed oil, sunflower seed oil, sesame seed oil and the like. In the grain group, corn oil is the most readily available, but the oil of other cereal grains such as wheat, oats, rye, rice, teff, triticale and the like may also be used. 6-10 carbon fatty acid esters of glycerol and 1,2-propanediol, while not occurring naturally in seed oils, may be prepared by hydrolysis, separation and esterification of the appropriate materials starting from the nut and seed oils. Fats and oils from mammalian milk are metabolizable and may therefore be used in the practice of this invention. The procedures for separation, purification, saponification and other means necessary for obtaining pure oils from animal sources are well known in the art. Most fish contain metabolizable oils which may be readily recovered. For example, cod liver oil, shark liver oils, and whale oil such as spermaceti exemplify several of the fish oils which may be used herein. A number of branched chain oils are synthesized biochemically in 5-carbon isoprene units and are generally referred to as terpenoids. Shark liver oil contains a branched, unsaturated terpenoids known as squalene, 2,6,10,15,19,23-hexamethyl-2,6,10,14,18,22-tetracosahexaene, which is particularly preferred herein. Squalane, the saturated analog to squalene, is also a preferred oil. Fish oils, including squalene and squalane, are readily available from commercial sources or may be obtained by methods known in the art. Other preferred oils are the tocopherols (see below). Mixtures of oils can be used.

[0714] Surfactants can be classified by their ‘HLB’ (hydrophile/lipophile balance). Preferred surfactants of the invention have a HLB of at least 10, preferably at least 15, and more preferably at least 16. The invention can be used with surfactants including, but not limited to: the polyoxyethylene sorbitan esters surfactants (commonly referred to as the Tweens), especially polysorbate 20 and polysorbate 80; copolymers of ethylene oxide (EO), propylene oxide (PO), and/or butylene oxide (BO), sold under the DOWFAX™ tradename, such as linear EO/PO block copolymers; octoxynols, which can vary in the number of repeating ethoxy (oxy-1,2-ethanediyl) groups, with octoxynol-9 (Triton X-100, or t-octylphenoxypolyethoxyethanol) being of particular interest; (octylphenoxy)polyethoxyethanol (IGEPAL CA-630/NP-40); phospholipids such as phosphatidylcholine (lecithin); nonylphenol ethoxylates, such as the Tergitol™ NP series; polyoxyethylene fatty ethers derived from lauryl, cetyl, stearyl and oleyl alcohols (known as Brij surfactants), such as triethyleneglycol monolauryl ether (Brij 30); and sorbitan esters (commonly known as the SPANs), such as sorbitan trioleate (Span 85) and sorbitan monolaurate. Non-ionic surfactants are preferred. Preferred surfactants for including in the emulsion are Tween 80 (polyoxyethylene sorbitan monooleate), Span 85 (sorbitan trioleate), lecithin and Triton X-100.

[0715] Mixtures of surfactants can be used e.g. Tween 80/Span 85 mixtures. A combination of a polyoxyethylene sorbitan ester such as polyoxyethylene sorbitan monooleate (Tween 80) and an octoxynol such as t-octylphenoxypolyethoxyethanol (Triton X-100) is also suitable. Another useful combination comprises laureth 9 plus a polyoxyethylene sorbitan ester and/or an octoxynol.

[0716] Preferred amounts of surfactants (% by weight) are: polyoxyethylene sorbitan esters (such as Tween 80) 0.01 to 1%, in particular about 0.1%; octyl- or nonylphenoxy polyoxyethanols (such as Triton X-100, or other detergents in the Triton series) 0.001 to 0.1%, in particular 0.005 to 0.02%; polyoxyethylene ethers (such as laureth 9) 0.1 to 20%, preferably 0.1 to 10% and in particular 0.1 to 1% or about 0.5%.

[0717] Preferred emulsion adjuvants have an average droplets size of <1 μm e.g. ≦750 nm, ≦500 nm, ≦400 nm, ≦300 nm, ≦250 nm, ≦220 nm, ≦200 nm, or smaller. These droplet sizes can conveniently be achieved by techniques such as microfluidisation.

[0718] Specific oil-in-water emulsion adjuvants useful with the invention include, but are not limited to:
[0719] A submicron emulsion of squalene, Tween 80, and Span 85. The composition of the emulsion by volume can be about 5% squalene, about 0.5% polysorbate 80 and about 0.5% Span 85. In weight terms, these ratios become 4.3% squalene, 0.5% polysorbate 80 and 0.48% Span 85. This adjuvant is known as ‘MF59’ [96-98], as described in more detail in Chapter 10 of ref 99 and chapter 12 of ref. 100. The MF59 emulsion advantageously includes citrate ions e.g. 10 mM sodium citrate buffer.
[0720] An emulsion of squalene, a tocopherol, and polysorbate 80 (Tween 80). The emulsion may include phosphate buffered saline. It may also include Span 85 (e.g. at 1%) and/or lecithin. These emulsions may have from 2 to 10% squalene, from 2 to 10% tocopherol and from 0.3 to 3% Tween 80, and the weight ratio of squalene:tocopherol is preferably ≦1 as this provides a more stable emulsion. Squalene and Tween 80 may be present volume ratio of about 5:2 or at a weight ratio of about 11:5. One such emulsion can be made by dissolving Tween 80 in PBS to give a 2% solution, then mixing 90 ml of this solution with a mixture of (5 g of DL-α-tocopherol and 5 ml squalene), then microfluidising the mixture. The resulting emulsion may have submicron oil droplets e.g. with an average diameter of between 100 and 250 nm, preferably about 180 nm. The emulsion may also include a 3-de-O-acylated monophosphoryl lipid A (3d-MPL). Another useful emulsion of this type may comprise, per human dose, 0.5-10 mg squalene, 0.5-11 mg tocopherol, and 0.1-4 mg polysorbate 80 [101].
[0721] An emulsion of squalene, a tocopherol, and a Triton detergent (e.g. Triton X-100). The emulsion may also include a 3d-MPL (see below). The emulsion may contain a phosphate buffer.
[0722] An emulsion comprising a polysorbate (e.g. polysorbate 80), a Triton detergent (e.g. Triton X-100) and a tocopherol (e.g. an α-tocopherol succinate). The emulsion may include these three components at a mass ratio of about 75:11:10 (e.g. 750 μg/ml polysorbate 80, 110 μg/ml Triton X-100 and 100 μg/ml α-tocopherol succinate), and these concentrations should include any contribution of these components from antigens. The emulsion may also include squalene. The emulsion may also include a 3d-MPL (see below). The aqueous phase may contain a phosphate buffer.
[0723] An emulsion of squalane, polysorbate 80 and poloxamer 401 (“Pluronic™ L121”). The emulsion can be formulated in phosphate buffered saline, pH 7.4. This emulsion is a useful delivery vehicle for muramyl dipeptides, and has been used with threonyl-MDP in the “SAF-1” adjuvant [102] (0.05-1% Thr-MDP, 5% squalane, 2.5% Pluronic L121 and 0.2% polysorbate 80). It can also be used without the Thr-MDP, as in the “AF” adjuvant [103] (5% squalane, 1.25% Pluronic L121 and 0.2% polysorbate 80). Microfluidisation is preferred.
[0724] An emulsion comprising squalene, an aqueous solvent, a polyoxyethylene alkyl ether hydrophilic nonionic surfactant (e.g. polyoxyethylene (12) cetostearyl ether) and a hydrophobic nonionic surfactant (e.g. a sorbitan ester or mannide ester, such as sorbitan monoleate or ‘Span 80’). The emulsion is preferably thermoreversible and/or has at least 90% of the oil droplets (by volume) with a size less than 200 nm [104]. The emulsion may also include one or more of: alditol; a cryoprotective agent (e.g. a sugar, such as dodecylmaltoside and/or sucrose); and/or an alkylpolyglycoside. The emulsion may include a TLR4 agonist [105]. Such emulsions may be lyophilized.
[0725] An emulsion of squalene, poloxamer 105 and Abil-Care [106]. The final concentration (weight) of these components in adjuvanted vaccines are 5% squalene, 4% poloxamer 105 (pluronic polyol) and 2% Abil-Care 85 (Bis-PEG/PPG-16/16 PEG/PPG-16/16 dimethicone; caprylic/capric triglyceride).
[0726] An emulsion having from 0.5-50% of an oil, 0.1-10% of a phospholipid, and 0.05-5% of a non-ionic surfactant. As described in reference 107, preferred phospholipid components are phosphatidylcholine, phosphatidylethanolamine, phosphatidylserine, phosphatidylinositol, phosphatidylglycerol, phosphatidic acid, sphingomyelin and cardiolipin. Submicron droplet sizes are advantageous.
[0727] A submicron oil-in-water emulsion of a non-metabolisable oil (such as light mineral oil) and at least one surfactant (such as lecithin, Tween 80 or Span 80). Additives may be included, such as QuilA saponin, cholesterol, a saponin-lipophile conjugate (such as GPI-0100, described in reference 108, produced by addition of aliphatic amine to desacylsaponin via the carboxyl group of glucuronic acid), dimethyldioctadecylammonium bromide and/or N,N-dioctadecyl-N,N-bis(2-hydroxyethyl)propanediamine.
[0728] An emulsion in which a saponin (e.g. QuilA or QS21) and a sterol (e.g. a cholesterol) are associated as helical micelles [109].
[0729] An emulsion comprising a mineral oil, a non-ionic lipophilic ethoxylated fatty alcohol, and a non-ionic hydrophilic surfactant (e.g. an ethoxylated fatty alcohol and/or polyoxyethylene-polyoxypropylene block copolymer) [110].
[0730] An emulsion comprising a mineral oil, a non-ionic hydrophilic ethoxylated fatty alcohol, and a non-ionic lipophilic surfactant (e.g. an ethoxylated fatty alcohol and/or polyoxyethylene-polyoxypropylene block copolymer) [110].

[0731] In some embodiments an emulsion may be mixed with antigen extemporaneously, at the time of delivery, and thus the adjuvant and antigen may be kept separately in a packaged or distributed vaccine, ready for final formulation at the time of use. In other embodiments an emulsion is mixed with antigen during manufacture, and thus the composition is packaged in a liquid adjuvanted form. The antigen will generally be in an aqueous form, such that the vaccine is finally prepared by mixing two liquids. The volume ratio of the two liquids for mixing can vary (e.g. between 5:1 and 1:5) but is generally about 1:1. Where concentrations of components are given in the above descriptions of specific emulsions, these concentrations are typically for an undiluted composition, and the concentration after mixing with an antigen solution will thus decrease.

[0732] Where a composition includes a tocopherol, any of the α, β, γ, δ, ε or ξ tocopherols can be used, but α-tocopherols are preferred. The tocopherol can take several forms e.g. different salts and/or isomers. Salts include organic salts, such as succinate, acetate, nicotinate, etc. D-α-tocopherol and DL-α-tocopherol can both be used. Tocopherols are advantageously included in vaccines for use in elderly patients (e.g. aged 60 years or older) because vitamin E has been reported to have a positive effect on the immune response in this patient group [111]. They also have antioxidant properties that may help to stabilize the emulsions [112]. A preferred α-tocopherol is DL-α-tocopherol, and the preferred salt of this tocopherol is the succinate. The succinate salt has been found to cooperate with TNF-related ligands in vivo.

[0733] C. Saponin Formulations [Chapter 22 of Ref 94]

[0734] Saponin formulations may also be used as adjuvants in the invention. Saponins are a heterogeneous group of sterol glycosides and triteipenoid glycosides that are found in the bark, leaves, stems, roots and even flowers of a wide range of plant species. Saponin from the bark of the Quillaia saponaria Molina tree have been widely studied as adjuvants. Saponin can also be commercially obtained from Smilax ornata (sarsaprilla), Gypsophilla paniculata (brides veil), and Saponaria officianalis (soap root). Saponin adjuvant formulations include purified formulations, such as QS21, as well as lipid formulations, such as ISCOMs. QS21 is marketed as Stimulon™.

[0735] Saponin compositions have been purified using HPLC and RP-HPLC. Specific purified fractions using these techniques have been identified, including QS7, QS17, QS18, QS21, QH-A, QH-B and QH-C. Preferably, the saponin is QS21. A method of production of QS21 is disclosed in ref. 113. Saponin formulations may also comprise a sterol, such as cholesterol [114].

[0736] Combinations of saponins and cholesterols can be used to form unique particles called immunostimulating complexs (ISCOMs) [chapter 23 of ref. 94]. ISCOMs typically also include a phospholipid such as phosphatidylethanolamine or phosphatidylcholine. Any known saponin can be used in ISCOMs. Preferably, the ISCOM includes one or more of QuilA, QHA & QHC. ISCOMs are further described in refs. 114-116. Optionally, the ISCOMS may be devoid of additional detergent [117].

[0737] A review of the development of saponin based adjuvants can be found in refs. 118 & 119.

[0738] D. Virosomes and Virus-Like Particles

[0739] Virosomes and virus-like particles (VLPs) can also be used as adjuvants in the invention. These structures generally contain one or more proteins from a virus optionally combined or formulated with a phospholipid. They are generally non-pathogenic, non-replicating and generally do not contain any of the native viral genome. The viral proteins may be recombinantly produced or isolated from whole viruses. These viral proteins suitable for use in virosomes or VLPs include proteins derived from influenza virus (such as HA or NA), Hepatitis B virus (such as core or capsid proteins), Hepatitis E virus, measles virus, Sindbis virus, Rotavirus, Foot-and-Mouth Disease virus, Retrovirus, Norwalk virus, human Papilloma virus, HIV, RNA-phages, Qβ-phage (such as coat proteins), GA-phage, fr-phage, AP205 phage, and Ty (such as retrotransposon Ty protein p1). VLPs are discussed further in refs. 120-125. Virosomes are discussed further in, for example, ref. 126

[0740] E. Bacterial or Microbial Derivatives

[0741] Adjuvants suitable for use in the invention include bacterial or microbial derivatives such as non-toxic derivatives of enterobacterial lipopolysaccharide (LPS), Lipid A derivatives, immunostimulatory oligonucleotides and ADP-ribosylating toxins and detoxified derivatives thereof.

[0742] Non-toxic derivatives of LPS include monophosphoryl lipid A (MPL) and 3-O-deacylated MPL (3dMPL). 3dMPL is a mixture of 3 de-O-acylated monophosphoryl lipid A with 4, 5 or 6 acylated chains. A preferred “small particle” form of 3 De-O-acylated monophosphoryl lipid A is disclosed in ref. 127. Such “small particles” of 3dMPL are small enough to be sterile filtered through a 0.22 μm membrane [127]. Other non-toxic LPS derivatives include monophosphoryl lipid A mimics, such as aminoalkyl glucosaminide phosphate derivatives e.g. RC-529 [128,129].

[0743] Lipid A derivatives include derivatives of lipid A from Escherichia coli such as OM-174. OM-174 is described for example in refs. 130 & 131.

[0744] Immunostimulatory oligonucleotides suitable for use as adjuvants in the invention include nucleotide sequences containing a CpG motif (a dinucleotide sequence containing an unmethylated cytosine linked by a phosphate bond to a guanosine). Double-stranded RNAs and oligonucleotides containing palindromic or poly(dG) sequences have also been shown to be immunostimulatory.

[0745] The CpG's can include nucleotide modifications/analogs such as phosphorothioate modifications and can be double-stranded or single-stranded. References 132, 133 and 134 disclose possible analog substitutions e.g. replacement of guanosine with 2′-deoxy-7-deazaguanosine. The adjuvant effect of CpG oligonucleotides is further discussed in refs. 135-140.

[0746] The CpG sequence may be directed to TLR9, such as the motif GTCGTT or TTCGTT [141]. The CpG sequence may be specific for inducing a Th1 immune response, such as a CpG-A ODN, or it may be more specific for inducing a B cell response, such a CpG-B ODN. CpG-A and CpG-B ODNs are discussed in refs. 142-144. Preferably, the CpG is a CpG-A ODN.

[0747] Preferably, the CpG oligonucleotide is constructed so that the 5′ end is accessible for receptor recognition. Optionally, two CpG oligonucleotide sequences may be attached at their 3′ ends to form “immunomers”. See, for example, refs. 141 & 145-147.

[0748] A useful CpG adjuvant is CpG7909, also known as ProMune™ (Coley Pharmaceutical Group, Inc.). Another is CpG1826. As an alternative, or in addition, to using CpG sequences, TpG sequences can be used [148], and these oligonucleotides may be free from unmethylated CpG motifs. The immunostimulatory oligonucleotide may be pyrimidine-rich. For example, it may comprise more than one consecutive thymidine nucleotide (e.g. TTTT, as disclosed in ref. 148), and/or it may have a nucleotide composition with >25% thymidine (e.g. >35%, >40%, >50%, >60%, >80%, etc.). For example, it may comprise more than one consecutive cytosine nucleotide (e.g. CCCC, as disclosed in ref. 148), and/or it may have a nucleotide composition with >25% cytosine (e.g. >35%, >40%, >50%, >60%, >80%, etc.). These oligonucleotides may be free from unmethylated CpG motifs. Immunostimulatory oligonucleotides will typically comprise at least 20 nucleotides. They may comprise fewer than 100 nucleotides.

[0749] A particularly useful adjuvant based around immunostimulatory oligonucleotides is known as IC-31™ [149]. Thus an adjuvant used with the invention may comprise a mixture of (i) an oligonucleotide (e.g. between 15-40 nucleotides) including at least one (and preferably multiple) CpI motifs (i.e. a cytosine linked to an inosine to form a dinucleotide), and (ii) a polycationic polymer, such as an oligopeptide (e.g. between 5-20 amino acids) including at least one (and preferably multiple) Lys-Arg-Lys tripeptide sequence(s). The oligonucleotide may be a deoxynucleotide comprising 26-mer sequence 5′-(IC)₁₃-3′ (SEQ ID NO: 230). The polycationic polymer may be a peptide comprising 11-mer amino acid sequence KLKLLLLLKLK (SEQ ID NO: 231). The oligonucleotide and polymer can form complexes e.g. as disclosed in references 150 & 151.

[0750] Bacterial ADP-ribosylating toxins and detoxified derivatives thereof may be used as adjuvants in the invention. Preferably, the protein is derived from E. coli (E. coli heat labile enterotoxin “LT”), cholera (“CT”), or pertussis (“PT”). The use of detoxified ADP-ribosylating toxins as mucosal adjuvants is described in ref. 152 and as parenteral adjuvants in ref. 153. The toxin or toxoid is preferably in the form of a holotoxin, comprising both A and B subunits. Preferably, the A subunit contains a detoxifying mutation; preferably the B subunit is not mutated. Preferably, the adjuvant is a detoxified LT mutant such as LT-K63, LT-R72, and LT-G192. The use of ADP-ribosylating toxins and detoxified derivatives thereof, particularly LT-K63 and LT-R72, as adjuvants can be found in refs. 154-161. A useful CT mutant is or CT-E29H [162]. Numerical reference for amino acid substitutions is preferably based on the alignments of the A and B subunits of ADP-ribosylating toxins set forth in ref. 163, specifically incorporated herein by reference in its entirety.

[0751] F. Human Immunomodulators

[0752] Human immunomodulators suitable for use as adjuvants in the invention include cytokines, such as interleukins (e.g. IL-1, IL-2, IL-4, IL-5, IL-6, IL-7, IL-12 [164], etc.) [165], interferons (e.g. interferon-γ), macrophage colony stimulating factor, and tumor necrosis factor. A preferred immunomodulator is IL-12.

[0753] G. Bioadhesives and Mucoadhesives

[0754] Bioadhesives and mucoadhesives may also be used as adjuvants in the invention. Suitable bioadhesives include esterified hyaluronic acid microspheres [166] or mucoadhesives such as cross-linked derivatives of poly(acrylic acid), polyvinyl alcohol, polyvinyl pyrollidone, polysaccharides and carboxymethylcellulose. Chitosan and derivatives thereof may also be used as adjuvants in the invention [167].

[0755] H. Microparticles

[0756] Microparticles may also be used as adjuvants in the invention. Microparticles (i.e. a particle of ˜100 nm to ˜150 μm in diameter, more preferably ˜200 nm to ˜30 μm in diameter, and most preferably ˜500 nm to ˜10 μm in diameter) formed from materials that are biodegradable and non-toxic (e.g. a poly(α-hydroxy acid), a polyhydroxybutyric acid, a polyorthoester, a polyanhydride, a polycaprolactone, etc.), with poly(lactide-co-glycolide) are preferred, optionally treated to have a negatively-charged surface (e.g. with SDS) or a positively-charged surface (e.g. with a cationic detergent, such as CTAB).

[0757] I. Liposomes (Chapters 13 & 14 of Ref. 94)

[0758] Examples of liposome formulations suitable for use as adjuvants are described in refs. 168-170.

[0759] J. Polyoxyethylene Ether and Polyoxyethylene Ester Formulations

[0760] Adjuvants suitable for use in the invention include polyoxyethylene ethers and polyoxyethylene esters [171]. Such formulations further include polyoxyethylene sorbitan ester surfactants in combination with an octoxynol [172] as well as polyoxyethylene alkyl ethers or ester surfactants in combination with at least one additional non-ionic surfactant such as an octoxynol [173]. Preferred polyoxyethylene ethers are selected from the following group: polyoxyethylene-9-lauryl ether (laureth 9), polyoxyethylene-9-steoryl ether, polyoxytheylene-8-steoryl ether, polyoxyethylene-4-lauryl ether, polyoxyethylene-35-lauryl ether, and polyoxyethylene-23-lauryl ether.

[0761] K. Phosphazenes

[0762] A phosphazene, such as poly[di(carboxylatophenoxy)phosphazene] (“PCPP”) as described, for example, in references 174 and 175, may be used.

[0763] L. Muramyl Peptides

[0764] Examples of muramyl peptides suitable for use as adjuvants in the invention include N-acetyl-muramyl-L-threonyl-D-isoglutamine (thr-MDP), N-acetyl-normuramyl-L-alanyl-D-isoglutamine (nor-MDP), and N-acetylmuramyl-L-alanyl-D-isoglutaminyl-L-alanine-2-(1′-2′-dipalmitoyl-sn-glycero-3-hydroxyphosphoryloxy)-ethylamine MTP-PE).

[0765] M. Imidazoquinolone Compounds.

[0766] Examples of imidazoquinolone compounds suitable for use adjuvants in the invention include Imiquimod (“R-837”) [176,177], Resiquimod (“R-848”) [178], and their analogs; and salts thereof (e.g. the hydrochloride salts). Further details about immunostimulatory imidazoquinolines can be found in references 179 to 183.

[0767] N. Substituted Ureas

[0768] Substituted ureas useful as adjuvants include compounds of formula I, II or III, or salts thereof:

[chemical structure]

[0769] as defined in reference 184, such as ‘ER 803058’, ‘ER 803732’, ‘ER 804053’, ER 804058’, ‘ER 804059’, ‘ER 804442’, ‘ER 804680’, ‘ER 804764’, ER 803022 or ‘ER 804057’ e.g.:

[chemical structure]

[0770] O. Further Adjuvants

[0771] Further adjuvants that may be used with the invention include:
[0772] An aminoalkyl glucosaminide phosphate derivative, such as RC-529 [185,186].
[0773] A thiosemicarbazone compound, such as those disclosed in reference 187. Methods of formulating, manufacturing, and screening for active compounds are also described in reference 187. The thiosemicarbazones are particularly effective in the stimulation of human peripheral blood mononuclear cells for the production of cytokines, such as TNF-α.
[0774] A tryptanthrin compound, such as those disclosed in reference 188. Methods of formulating, manufacturing, and screening for active compounds are also described in reference 188. The thiosemicarbazones are particularly effective in the stimulation of human peripheral blood mononuclear cells for the production of cytokines, such as TNF-α.
[0775] A nucleoside analog, such as: (a) Isatorabine (ANA-245; 7-thia-8-oxoguanosine):

[chemical structure]

and prodrugs thereof; (b) ANA975; (c) ANA-025-1; (d) ANA380; (e) the compounds disclosed in references 189 to 191Loxoribine (7-allyl-8-oxoguanosine) [192].
[0776] Compounds disclosed in reference 193, including: Acylpiperazine compounds, Indoledione compounds, Tetrahydraisoquinoline (THIQ) compounds, Benzocyclodione compounds, Aminoazavinyl compounds, Aminobenzimidazole quinolinone (ABIQ) compounds [194,195], Hydrapthalamide compounds, Benzophenone compounds, Isoxazole compounds, Sterol compounds, Quinazilinone compounds, Pyrrole compounds [196], Anthraquinone compounds, Quinoxaline compounds, Triazine compounds, Pyrazalopyrimidine compounds, and Benzazole compounds [197].
[0777] Compounds containing lipids linked to a phosphate-containing acyclic backbone, such as the TLR4 antagonist E5564 [198,199]:
[0778] A polyoxidonium polymer [200,201] or other N-oxidized polyethylene-piperazine derivative.
[0779] Methyl inosine 5′-monophosphate (“MIMP”) [202].
[0780] A polyhydroxlated pyrrolizidine compound [203], such as one having formula:

[chemical structure]

where R is selected from the group comprising hydrogen, straight or branched, unsubstituted or substituted, saturated or unsaturated acyl, alkyl (e.g. cycloalkyl), alkenyl, alkynyl and aryl groups, or a pharmaceutically acceptable salt or derivative thereof. Examples include, but are not limited to: casuarine, casuarine-6-α-D-glucopyranose, 3-epi-casuarine, 7-epi-casuarine, 3,7-diepi-casuarine, etc.
[0781] A CD1d ligand, such as an α-glycosylceramide [204-211] (e.g. α-galactosylceramide), phytosphingosine-containing α-glycosylceramides, OCH, KRN7000 [(2S,3S,4R)-1-O-(α-D-galactopyranosyl)-2-(N-hexacosanoylamino)-1,3,4-octadecanetriol], CRONY-101, 3″-O-sulfo-galactosylceramide, etc.
[0782] A gamma inulin [212] or derivative thereof, such as algammulin.

[chemical structure]

[0783] Adjuvant Combinations

[0784] The invention may also comprise combinations of aspects of one or more of the adjuvants identified above. For example, the following adjuvant compositions may be used in the invention: (1) a saponin and an oil-in-water emulsion [213]; (2) a saponin (e.g. QS21)+a non-toxic LPS derivative (e.g. 3dMPL) [214]; (3) a saponin (e.g. QS21)+a non-toxic LPS derivative (e.g. 3dMPL)+a cholesterol; (4) a saponin (e.g. QS21)+3dMPL+IL-12 (optionally+a sterol) [215]; (5) combinations of 3dMPL with, for example, QS21 and/or oil-in-water emulsions [216]; (6) SAF, containing 10% squalane, 0.4% Tween 80™, 5% pluronic-block polymer L121, and thr-MDP, either microfluidized into a submicron emulsion or vortexed to generate a larger particle size emulsion. (7) Ribi™ adjuvant system (RAS), (Ribi Immunochem) containing 2% squalene, 0.2% Tween 80, and one or more bacterial cell wall components from the group consisting of monophosphoiylipid A (MPL), trehalose dimycolate (TDM), and cell wall skeleton (CWS), preferably MPL+CWS (Detox™); and (8) one or more mineral salts (such as an aluminum salt)+a non-toxic derivative of LPS (such as 3dMPL).

[0785] Other substances that act as immunostimulating agents are disclosed in chapter 7 of ref. 94.

[0786] The use of an aluminium hydroxide and/or aluminium phosphate adjuvant is particularly preferred, and antigens are generally adsorbed to these salts. Calcium phosphate is another preferred adjuvant. Other preferred adjuvant combinations include combinations of Th1 and Th2 adjuvants such as CpG & alum or resiquimod & alum. A combination of aluminium phosphate and 3dMPL may be used, as this has been reported as effective in pneumococcal immunisation [325].

[0787] The compositions of the invention may elicit both a cell mediated immune response as well as a humoral immune response. This immune response will preferably induce long lasting (e.g. neutralising) antibodies and a cell mediated immunity that can quickly respond upon exposure to pnuemococcus.

[0788] Two types of T cells, CD4 and CD8 cells, are generally thought necessary to initiate and/or enhance cell mediated immunity and humoral immunity. CD8 T cells can express a CD8 co-receptor and are commonly referred to as Cytotoxic T lymphocytes (CTLs). CD8 T cells are able to recognized or interact with antigens displayed on MHC Class I molecules.

[0789] CD4 T cells can express a CD4 co-receptor and are commonly referred to as T helper cells. CD4 T cells are able to recognize antigenic peptides bound to MHC class II molecules. Upon interaction with a MHC class II molecule, the CD4 cells can secrete factors such as cytokines. These secreted cytokines can activate B cells, cytotoxic T cells, macrophages, and other cells that participate in an immune response. Helper T cells or CD4+ cells can be further divided into two functionally distinct subsets: TH1 phenotype and TH2 phenotypes which differ in their cytokine and effector function.

[0790] Activated TH1 cells enhance cellular immunity (including an increase in antigen-specific CTL production) and are therefore of particular value in responding to intracellular infections. Activated TH1 cells may secrete one or more of IL-2, IFN-γ, and TNF-β. A TH1 immune response may result in local inflammatory reactions by activating macrophages, NK (natural killer) cells, and CD8 cytotoxic T cells (CTLs). A TH1 immune response may also act to expand the immune response by stimulating growth of B and T cells with IL-12. TH1 stimulated B cells may secrete IgG2a.

[0791] Activated TH2 cells enhance antibody production and are therefore of value in responding to extracellular infections. Activated TH2 cells may secrete one or more of IL-4, IL-5, IL-6, and IL-10. A TH2 immune response may result in the production of IgG1, IgE, IgA and memory B cells for future protection.

[0792] An enhanced immune response may include one or more of an enhanced TH1 immune response and a TH2 immune response.

[0793] A TH1 immune response may include one or more of an increase in CTLs, an increase in one or more of the cytokines associated with a TH1 immune response (such as IL-2, IFN-γ, and TNF-β), an increase in activated macrophages, an increase in NK activity, or an increase in the production of IgG2a. Preferably, the enhanced TH1 immune response will include an increase in IgG2a production.

[0794] A TH1 immune response may be elicited using a TH1 adjuvant. A TH1 adjuvant will generally elicit increased levels of IgG2a production relative to immunization of the antigen without adjuvant. TH1 adjuvants suitable for use in the invention may include for example saponin formulations, virosomes and virus like particles, non-toxic derivatives of enterobacterial lipopolysaccharide (LPS), immunostimulatory oligonucleotides. Immunostimulatory oligonucleotides, such as oligonucleotides containing a CpG motif, are preferred TH1 adjuvants for use in the invention.

[0795] A TH2 immune response may include one or more of an increase in one or more of the cytokines associated with a TH2 immune response (such as IL-4, IL-5, IL-6 and IL-10), or an increase in the production of IgG1, IgE, IgA and memory B cells. Preferably, the enhanced TH2 immune response will include an increase in IgG1 production.

[0796] A TH2 immune response may be elicited using a TH2 adjuvant. A TH2 adjuvant will generally elicit increased levels of IgG1 production relative to immunization of the antigen without adjuvant. TH2 adjuvants suitable for use in the invention include, for example, mineral containing compositions, oil-emulsions, and ADP-ribosylating toxins and detoxified derivatives thereof. Mineral containing compositions, such as aluminium salts are preferred TH2 adjuvants for use in the invention.

[0797] Preferably, the invention includes a composition comprising a combination of a TH1 adjuvant and a TH2 adjuvant. Preferably, such a composition elicits an enhanced TH1 and an enhanced TH2 response, i.e., an increase in the production of both IgG1 and IgG2a production relative to immunization without an adjuvant. Still more preferably, the composition comprising a combination of a TH1 and a TH2 adjuvant elicits an increased TH1 and/or an increased TH2 immune response relative to immunization with a single adjuvant (i.e., relative to immunization with a TH1 adjuvant alone or immunization with a TH2 adjuvant alone).

[0798] The immune response may be one or both of a TH1 immune response and a TH2 response. Preferably, immune response provides for one or both of an enhanced TH1 response and an enhanced TH2 response.

[0799] The enhanced immune response may be one or both of a systemic and a mucosal immune response. Preferably, the immune response provides for one or both of an enhanced systemic and an enhanced mucosal immune response. Preferably the mucosal immune response is a TH2 immune response. Preferably, the mucosal immune response includes an increase in the production of IgA.

[0800] Pneumococcal infections can affect various areas of the body and so the compositions of the invention may be prepared in various forms. For example, the compositions may be prepared as injectables, either as liquid solutions or suspensions. Solid forms suitable for solution in, or suspension in, liquid vehicles prior to injection can also be prepared (e.g. a lyophilised composition or a spray-freeze dried composition). The composition may be prepared for topical administration e.g. as an ointment, cream or powder. The composition may be prepared for oral administration e.g. as a tablet or capsule, as a spray, or as a syrup (optionally flavoured). The composition may be prepared for pulmonary administration e.g. as an inhaler, using a fine powder or a spray. The composition may be prepared as a suppository or pessary. The composition may be prepared for nasal, aural or ocular administration e.g. as drops. The composition may be in kit form, designed such that a combined composition is reconstituted just prior to administration to a patient. Such kits may comprise one or more antigens in liquid form and one or more lyophilised antigens.

[0801] Where a composition is to be prepared extemporaneously prior to use (e.g. where a component is presented in lyophilised form) and is presented as a kit, the kit may comprise two vials, or it may comprise one ready-filled syringe and one vial, with the contents of the syringe being used to reactivate the contents of the vial prior to injection.

[0802] Immunogenic compositions used as vaccines comprise an immunologically effective amount of antigen(s), as well as any other components, as needed. By ‘immunologically effective amount’, it is meant that the administration of that amount to an individual, either in a single dose or as part of a series, is effective for treatment or prevention. This amount varies depending upon the health and physical condition of the individual to be treated, age, the taxonomic group of individual to be treated (e.g. non-human primate, primate, etc.), the capacity of the individual's immune system to synthesise antibodies, the degree of protection desired, the formulation of the vaccine, the treating doctor's assessment of the medical situation, and other relevant factors. It is expected that the amount will fall in a relatively broad range that can be determined through routine trials. Where more than one antigen is included in a composition then two antigens may be present at the same dose as each other or at different doses.

[0803] As mentioned above, a composition may include a temperature protective agent, and this component may be particularly useful in adjuvanted compositions (particularly those containing a mineral adjuvant, such as an aluminium salt). As described in reference 217, a liquid temperature protective agent may be added to an aqueous vaccine composition to lower its freezing point e.g. to reduce the freezing point to below 0° C. Thus the composition can be stored below 0° C., but above its freezing point, to inhibit thermal breakdown. The temperature protective agent also permits freezing of the composition while protecting mineral salt adjuvants against agglomeration or sedimentation after freezing and thawing, and may also protect the composition at elevated temperatures e.g. above 40° C. A starting aqueous vaccine and the liquid temperature protective agent may be mixed such that the liquid temperature protective agent forms from 1-80% by volume of the final mixture. Suitable temperature protective agents should be safe for human administration, readily miscible/soluble in water, and should not damage other components (e.g. antigen and adjuvant) in the composition. Examples include glycerin, propylene glycol, and/or polyethylene glycol (PEG). Suitable PEGs may have an average molecular weight ranging from 200-20,000 Da. In a preferred embodiment, the polyethylene glycol can have an average molecular weight of about 300 Da (‘PEG-300’).

[0804] The invention provides an immunogenic composition comprising: (i) one or more antigen(s) selected from the first, second, third, fourth, fifth, sixth, seventh, eighth, ninth or tenth antigen groups; and (ii) a temperature protective agent. This composition may be formed by mixing (i) an aqueous composition comprising one or more antigen(s) selected from the first, second, third, fourth, fifth, sixth, seventh, eighth, ninth or tenth antigen groups, with (ii) a temperature protective agent. The mixture may then be stored e.g. below 0° C., from 0-20° C., from 20-35° C., from 35-55° C., or higher. It may be stored in liquid or frozen form. The mixture may be lyophilised. The composition may alternatively be formed by mixing (i) a dried composition comprising one or more antigen(s) selected from the first, second, third, fourth, fifth, sixth, seventh, eighth, ninth or tenth antigen groups, with (ii) a liquid composition comprising the temperature protective agent. Thus component (ii) can be used to reconstitute component (i).

[0805] Methods of Treatment, and Administration of the Vaccine

[0806] The invention also provides a method for raising an immune response in a mammal comprising the step of administering an effective amount of a composition of the invention. The immune response is preferably protective and preferably involves antibodies and/or cell-mediated immunity. The method may raise a booster response.

[0807] The invention also provides at least two antigens of the invention for combined use as a medicament e.g. for use in raising an immune response in a mammal.

[0808] The invention also provides the use of at least two antigens of the invention in the manufacture of a medicament for raising an immune response in a mammal.

[0809] By raising an immune response in the mammal by these uses and methods, the mammal can be protected against pneumococcal infection. More particularly, the mammal may be protected against pneumococcal meningitis. The invention is effective against pneumococci of various different serotypes, but can be particularly useful in protecting against disease resulting from pneumococcal infection by strains in serotype 1, 5, 6 and 19 A.

[0810] The invention also provides a kit comprising a first component and a second component wherein neither the first component nor the second component is a composition of the invention as described above, but wherein the first component and the second component can be combined to provide a composition of the invention as described above. The kit may further include a third component comprising one or more of the following: instructions, syringe or other delivery device, adjuvant, or pharmaceutically acceptable formulating solution.

[0811] The invention also provides a delivery device pre-filled with an immunogenic composition of the invention.

[0812] The mammal is preferably a human. Where the vaccine is for prophylactic use, the human is preferably a child (e.g. a toddler or infant) or a teenager; where the vaccine is for therapeutic use, the human is preferably a teenager or an adult. A vaccine intended for children may also be administered to adults e.g. to assess safety, dosage, immunogenicity, etc.

[0813] One way of checking efficacy of therapeutic treatment involves monitoring pneumococcal infection after administration of the compositions of the invention. One way of checking efficacy of prophylactic treatment involves monitoring immune responses, systemically (such as monitoring the level of IgG1 and IgG2a production) and/or mucosally (such as monitoring the level of IgA production), against the antigens in the compositions of the invention after administration of the composition. Typically, antigen-specific serum antibody responses are determined post-immunisation but pre-challenge whereas antigen-specific mucosal antibody responses are determined post-immunisation and post-challenge.

[0814] Another way of assessing the immunogenicity of the compositions of the present invention is to express the proteins recombinantly for screening patient sera or mucosal secretions by immunoblot and/or microarrays. A positive reaction between the protein and the patient sample indicates that the patient has mounted an immune response to the protein in question. This method may also be used to identify immunodominant antigens and/or epitopes within antigens.

[0815] The efficacy of vaccine compositions can also be determined in vivo by challenging animal models of pneumococcal infection, e.g., guinea pigs or mice, with the vaccine compositions. One such model is described in reference 218.

[0816] Compositions of the invention will generally be administered directly to a patient. Direct delivery may be accomplished by parenteral injection (e.g. subcutaneously, intraperitoneally, intravenously, intramuscularly, or to the interstitial space of a tissue), or mucosally, such as by rectal, oral (e.g. tablet, spray), vaginal, topical, transdermal or transcutaneous, intranasal, ocular, aural, pulmonary or other mucosal administration.

[0817] The invention may be used to elicit systemic and/or mucosal immunity, preferably to elicit an enhanced systemic and/or mucosal immunity.

[0818] Preferably the enhanced systemic and/or mucosal immunity is reflected in an enhanced TH1 and/or TH2 immune response. Preferably, the enhanced immune response includes an increase in the production of IgG1 and/or IgG2a and/or IgA.

[0819] Dosage can be by a single dose schedule or a multiple dose schedule. Multiple doses may be used in a primary immunisation schedule and/or in a booster immunisation schedule. In a multiple dose schedule the various doses may be given by the same or different routes e.g. a parenteral prime and mucosal boost, a mucosal prime and parenteral boost, etc. Multiple doses will typically be administered at least 1 week apart (e.g. about 2 weeks, about 3 weeks, about 4 weeks, about 6 weeks, about 8 weeks, about 10 weeks, about 12 weeks, about 16 weeks, etc.).

[0820] Vaccines prepared according to the invention may be used to treat both children and adults. Thus a human patient may be less than 1 year old, 1-5 years old, 5-15 years old, 15-55 years old, or at least 55 years old. Preferred patients for receiving the vaccines are the elderly (e.g. ≧50 years old, ≧60 years old, and preferably ≧65 years), the young (e.g. ≦5 years old), hospitalised patients, healthcare workers, armed service and military personnel, pregnant women, the chronically ill, or immunodeficient patients. The vaccines are not suitable solely for these groups, however, and may be used more generally in a population.

[0821] Vaccines produced by the invention may be administered to patients at substantially the same time as (e.g. during the same medical consultation or visit to a healthcare professional or vaccination centre) other vaccines e.g. at substantially the same time as a measles vaccine, a mumps vaccine, a rubella vaccine, a MMR vaccine, a varicella vaccine, a MMRV vaccine, a diphtheria vaccine, a tetanus vaccine, a pertussis vaccine, a DTP vaccine, a conjugated H.influenzae type b vaccine, an inactivated poliovirus vaccine, a hepatitis B virus vaccine, a meningococcal conjugate vaccine (such as a tetravalent A-C-W135-Y vaccine), a respiratory syncytial virus vaccine, etc.

[0822] Mucosal Immunisation

[0823] The invention provides an immunogenic composition comprising (i) a polypeptide antigen of the invention, and (ii) a bacterial ADP-ribosylating toxins and or detoxified derivative thereof. The invention also provides a method for raising an immune response in a mammal comprising the step of administering an effective amount of such an immunogenic composition to the mammal. The composition is preferably administered mucosally (to a mucosal surface) e.g. it may be administered intranasally.

[0824] The polypeptide antigen may be, for example, part of the seventh antigen group. The polypeptide antigen may be a pilus antigen, such as a RrgA or RrgB polypeptide.

[0825] The toxin of component (i) may be, for example, derived from E. coli heat labile enterotoxin (“LT”). The derivative may have a detoxifying mutation in its A subunit e.g. it may be LT-K63 or LT-R72.

[0826] Intranasal administration of a RrgB polypeptide and a LT-K63 adjuvant is preferred. In mice this has been shown to decrease bacterial load of an invasive pneumococcal strain in the nasopharynx, lungs and blood and to give a 5-fold increase in survival rate.

[0827] Nucleic Acid Immunisation

[0828] The immunogenic compositions described above include polypeptide antigens from pneumococcus. In all cases, however, the polypeptide antigens can be replaced by nucleic acids (typically DNA) encoding those polypeptides, to give compositions, methods and uses based on nucleic acid immunisation. Nucleic acid immunisation is now a developed field (e.g. see references 219 to 226 etc.), and has been applied to pneumococcal vaccines (e.g. ref. 227).

[0829] The nucleic acid encoding the immunogen is expressed in vivo after delivery to a patient and the expressed immunogen then stimulates the immune system. The active ingredient will typically take the form of a nucleic acid vector comprising: (i) a promoter; (ii) a sequence encoding the immunogen, operably linked to the promoter; and optionally (iii) a selectable marker. Preferred vectors may further comprise (iv) an origin of replication; and (v) a transcription terminator downstream of and operably linked to (ii). In general, (i) & (v) will be eukaryotic and (iii) & (iv) will be prokaryotic.

[0830] Preferred promoters are viral promoters e.g. from cytomegalovirus (CMV). The vector may also include transcriptional regulatory sequences (e.g. enhancers) in addition to the promoter and which interact functionally with the promoter. Preferred vectors include the immediate-early CMV enhancer/promoter, and more preferred vectors also include CMV intron A. The promoter is operably linked to a downstream sequence encoding an immunogen, such that expression of the immunogen-encoding sequence is under the promoter's control.

[0831] Where a marker is used, it preferably functions in a microbial host (e.g. in a prokaryote, in a bacteria, in a yeast). The marker is preferably a prokaryotic selectable marker (e.g. transcribed under the control of a prokaryotic promoter). For convenience, typical markers are antibiotic resistance genes.

[0832] The vector of the invention is preferably an autonomously replicating episomal or extrachromosomal vector, such as a plasmid.

[0833] The vector of the invention preferably comprises an origin of replication. It is preferred that the origin of replication is active in prokaryotes but not in eukaryotes.

[0834] Preferred vectors thus include a prokaryotic marker for selection of the vector, a prokaryotic origin of replication, but a eukaryotic promoter for driving transcription of the immunogen-encoding sequence. The vectors will therefore (a) be amplified and selected in prokaryotic hosts without polypeptide expression, but (b) be expressed in eukaryotic hosts without being amplified. This arrangement is ideal for nucleic acid immunization vectors.

[0835] The vector of the invention may comprise a eukaryotic transcriptional terminator sequence downstream of the coding sequence. This can enhance transcription levels. Where the coding sequence does not have its own, the vector of the invention preferably comprises a polyadenylation sequence. A preferred polyadenylation sequence is from bovine growth hormone.

[0836] The vector of the invention may comprise a multiple cloning site

[0837] In addition to sequences encoding the immunogen and a marker, the vector may comprise a second eukaryotic coding sequence. The vector may also comprise an IRES upstream of said second sequence in order to permit translation of a second eukaryotic polypeptide from the same transcript as the immunogen. Alternatively, the immunogen-coding sequence may be downstream of an IRES.

[0838] The vector of the invention may comprise unmethylated CpG motifs e.g. unmethylated DNA sequences which have in common a cytosine preceding a guanosine, flanked by two 5′ purines and two 3′ pyrimidines. In their unmethylated form these DNA motifs have been demonstrated to be potent stimulators of several types of immune cell.

[0839] Vectors may be delivered in a targeted way. Receptor-mediated DNA delivery techniques are described in, for example, references 228 to 233. Therapeutic compositions containing a nucleic acid are administered in a range of about 100 ng to about 200 mg of DNA for local administration in a gene therapy protocol. Concentration ranges of about 500 ng to about 50 mg, about 1 μg to about 2 mg, about 5 μg to about 500 μg, and about 20 μg to about 100 μg of DNA can also be used during a gene therapy protocol. Factors such as method of action (e.g. for enhancing or inhibiting levels of the encoded gene product) and efficacy of transformation and expression are considerations which will affect the dosage required for ultimate efficacy. Where greater expression is desired over a larger area of tissue, larger amounts of vector or the same amounts re-administered in a successive protocol of administrations, or several administrations to different adjacent or close tissue portions may be required to effect a positive therapeutic outcome. In all cases, routine experimentation in clinical trials will determine specific ranges for optimal therapeutic effect.

[0840] Vectors can be delivered using gene delivery vehicles. The gene delivery vehicle can be of viral or non-viral origin (see generally references 234 to 237).

[0841] Viral-based vectors for delivery of a desired nucleic acid and expression in a desired cell are well known in the art. Exemplary viral-based vehicles include, but are not limited to, recombinant retroviruses (e.g. references 238 to 248), alphavirus-based vectors (e.g. Sindbis virus vectors, Semliki forest virus (ATCC VR-67; ATCC VR-1247), Ross River virus (ATCC VR-373; ATCC VR-1246) and Venezuelan equine encephalitis virus (ATCC VR-923; ATCC VR-1250; ATCC VR 1249; ATCC VR-532); hybrids or chimeras of these viruses may also be used), poxvirus vectors (e.g. vaccinia, fowlpox, canarypox, modified vaccinia Ankara, etc.), adenovirus vectors, and adeno-associated virus (AAV) vectors (e.g. see refs. 249 to 254). Administration of DNA linked to killed adenovirus [255] can also be employed.

[0842] Non-viral delivery vehicles and methods can also be employed, including, but not limited to, polycationic condensed DNA linked or unlinked to killed adenovirus alone [e.g. 255], ligand-linked DNA [256], eukaryotic cell delivery vehicles cells [e.g. refs. 257 to 261] and nucleic charge neutralization or fusion with cell membranes. Naked DNA can also be employed. Exemplary naked DNA introduction methods are described in refs. 262 and 263. Liposomes (e.g. immunoliposomes) that can act as gene delivery vehicles are described in refs. 264 to 268. Additional approaches are described in references 269 & 270.

[0843] Further non-viral delivery suitable for use includes mechanical delivery systems such as the approach described in ref. 270. Moreover, the coding sequence and the product of expression of such can be delivered through deposition of photopolymerized hydrogel materials or use of ionizing radiation [e.g. refs. 271 & 272]. Other conventional methods for gene delivery that can be used for delivery of the coding sequence include, for example, use of hand-held gene transfer particle gun [273] or use of ionizing radiation for activating transferred genes [271 & 272].

[0844] Delivery DNA using PLG {poly(lactide-co-glycolide)} microparticles is a particularly preferred method e.g. by adsorption to the microparticles, which are optionally treated to have a negatively-charged surface (e.g. treated with SDS) or a positively-charged surface (e.g. treated with a cationic detergent, such as CTAB).

[0845] Antibodies

[0846] Antibodies against pneumococcal antigens can be used for passive immunisation [274]. Thus the invention provides an antibody that is specific for an antigen in the first, second or third antigen groups. The invention also provides an antibody that is specific for an antigen in the fourth, fifth, sixth, seventh, eighth, ninth or tenth antigen groups. The invention also provides the use of such antibodies in therapy. The invention also provides the use of such antibodies in the manufacture of a medicament. The invention also provides a method for treating a mammal comprising the step of administering an effective amount of an antibody of the invention. As described above for immunogenic compositions, these methods and uses allow a mammal to be protected against pneumococcal infection.

[0847] The term “antibody” includes intact immunoglobulin molecules, as well as fragments thereof which are capable of binding an antigen. These include hybrid (chimeric) antibody molecules [275, 276]; F(ab′)2 and F(ab) fragments and Fv molecules; non-covalent heterodimers [277, 278]; single-chain Fv molecules (sFv) [279]; dimeric and trimeric antibody fragment constructs; minibodies [280, 281]; humanized antibody molecules [282-284]; and any functional fragments obtained from such molecules, as well as antibodies obtained through non-conventional processes such as phage display. Preferably, the antibodies are monoclonal antibodies. Methods of obtaining monoclonal antibodies are well known in the art. Humanised or fully-human antibodies are preferred.

[0848] General

[0849] The practice of the present invention will employ, unless otherwise indicated, conventional methods of chemistry, biochemistry, molecular biology, immunology and pharmacology, within the skill of the art. Such techniques are explained fully in the literature. See, e.g., references 285-292, etc.

[0850] “GI” numbering is used above. A GI number, or “GenInfo Identifier”, is a series of digits assigned consecutively to each sequence record processed by NCBI when sequences are added to its databases. The GI number bears no resemblance to the accession number of the sequence record. When a sequence is updated (e.g. for correction, or to add more annotation or information) then it receives a new GI number. Thus the sequence associated with a given GI number is never changed.

[0851] Where the invention concerns an “epitope”, this epitope may be a B-cell epitope and/or a T-cell epitope. Such epitopes can be identified empirically (e.g. using PEPSCAN [293,294] or similar methods), or they can be predicted (e.g. using the Jameson-Wolf antigenic index [295], matrix-based approaches [296], MAPITOPE [297], TEPITOPE [298,299], neural networks [300], OptiMer & EpiMer [301, 302], ADEPT [303], Tsites [304], hydrophilicity [305], antigenic index [306] or the methods disclosed in references 307-311, etc.). Epitopes are the parts of an antigen that are recognised by and bind to the antigen binding sites of antibodies or T-cell receptors, and they may also be referred to as “antigenic determinants”.

[0852] Where an antigen “domain” is omitted, this may involve omission of a signal peptide, of a cytoplasmic domain, of a transmembrane domain, of an extracellular domain, etc.

[0853] The term “comprising” encompasses “including” as well as “consisting” e.g. a composition “comprising” X may consist exclusively of X or may include something additional e.g. X+Y.

[0854] The term “about” in relation to a numerical value x means, for example, x±10%.

[0855] References to a percentage sequence identity between two amino acid sequences means that, when aligned, that percentage of amino acids are the same in comparing the two sequences. This alignment and the percent homology or sequence identity can be determined using software programs known in the art, for example those described in section 7.7.18 of ref. 312. A preferred alignment is determined by the Smith-Waterman homology search algorithm using an affine gap search with a gap open penalty of 12 and a gap extension penalty of 2, BLOSUM matrix of 62. The Smith-Waterman homology search algorithm is disclosed in ref. 313.

### BRIEF DESCRIPTION OF DRAWINGS

[0856] FIG. 1 shows the mortality course of mice after bacterial challenge, followed for up to 10 days, after immunisation with spr0565 or spr1431, compared to the mortality course of mice in a control group.

[0857] FIG. 2 shows similar data for combined antigens.

[0858] FIG. 3 shows bacterial numbers (CFU/ml) in the blood of mice, comparing test groups with control (ctrl) groups. Circles are individual animals, and the bar is the geometric mean. Data are from animal groups: (3A) 0; (3B) 1; (3C) 4; (3D) 6. FIG. 4 shows survival data (days) for the same groups. Diamonds are individual animals and bars shown the median.

[0859] FIG. 5 shows mortality course as in FIG. 2, but with different antigen combinations.

[0860] FIG. 6 shows results of bacteremia experiments. The y-axis shows CFU/ml and the numbers beneath the x-axis show P values calculated by the U-test.

[0861] FIG. 7 shows results of mortality experiments. The y-axis shows the survival time (days) and the numbers beneath the x-axis show P values calculated by the U-test.

[0862] FIGS. 8-25 and 28-31 and 33-36 follow the same pattern as FIGS. 6 and 7.

[0863] FIG. 26 shows the results of an OPKA assay at two serum dilutions ( 1/12 or 1/36). Each triplet shows data with a PBS control (left), combo-1 (middle) or combo-2 (right). Y-axis shows % killing.

[0864] FIG. 27 shows results from OPKA experiments with diluted serum.

[0865] FIG. 32 shows purification gels for hybrids of spr2021 and spr0096. The left-hand bands are the hybrid proteins and the right-hand bands are a BSA standard (64 kDa). FIG. 32A shows spr2021-spr0096 and FIG. 32B shows spr0096-spr2021.

### MODES FOR CARRYING OUT THE INVENTION

[0866] Antigen Identification

[0867] Twelve pneumococcal polypeptides were selected for immunological investigation. Numbered according to the R6 genome [84], these twelve are: spr0057; spr0286; spr0565; spr0867; spr1098; spr1345; spr1416; spr1418; spr1431; spr1739; and spr2021.

[0868] The spr0057 antigen is annotated as β-N-acetylhexosaminidase (strH), which cleaves N-acetylglucosamine on human glycoproteins [314]. Thus the enzyme might facilitate pathogenesis/colonisation of humans, and blocking it might be useful for vaccination purposes. Moreover, the protein is surface-located, being LPxTG-anchored, and immunoreactive sera have been seen in convalescent pneumonia and meningitis patients [315]. The spr0057 sequence is 98.6% conserved between 22 different pneumococcal strains, and may thus offer broad protection. It is absent from S. mitis and S. mutans. There are no published studies on the protective efficacy of spr0057 as an immunogen. The wild-type spr0057 gene is 3939 nucleotides long, but for immunisation purposes a 3741-mer fragment was used (encoding SEQ ID NO: 180). When expressed as a His-tagged recombinant protein, enzymatic activity is seen in vitro when using a 4-nitrophenyl-N-acetyl-β-D-glucosaminide substrate, but not when using a 2-nitrophenyl-β-D-galactopyranoside substrate. The in vivo expression of spr0057 by pneumococci was monitored in nasal and lung washes, and was strongly upregulated.

[0869] The spr0096 antigen is annotated as a hypothetical protein that contains a LysM motif. The spr0096 sequence is 99% conserved between 22 different pneumococcal strains, and may thus offer broad protection. The wild-type spr0096 gene is 504 nucleotides long, but for immunisation purposes a 423-mer fragment (encoding SEQ ID NO: 229) was used.

[0870] The spr0286 antigen is annotated as hyaluronidase (Hyl), which degrades hyaluronic acid, a component of the extracellular matrix. The protein is surface-located, being LPxTG-anchored. The spr0286 sequence is 98.8% conserved between 22 different pneumococcal strains, and may thus offer broad protection. Although the hyaluronidase is a virulence factor, reference 316 reported that hyaluronidase neither influenced the clinical course of disease nor had any effect on systemic bacterial spread in the authors' disease model. The wild-type spr0286 gene is 3201 nucleotides long, but for immunisation purposes a 1884-mer (encoding SEQ ID NO: 182) or 1356-mer fragment (encoding SEQ ID NO: 183) was used.

[0871] The spr0565 antigen is annotated as P-galactosidase (BgaA), which cleaves galactose on human glycoproteins [314]. Thus the enzyme might facilitate pathogenesis/colonisation of humans, and blocking it might be useful for vaccination purposes. Moreover, the protein is surface-located, being LPxTG-anchored, and immunoreactive sera have been seen in convalescent pneumonia and meningitis patients. The spr0565 sequence is 97.9% conserved between 22 different pneumococcal strains, and may thus offer broad protection. There are no published studies on the protective efficacy of spr0565 as an immunogen. The wild-type spr0565 gene is 6687 nucleotides long, but for immunisation purposes a 6444-mer fragment was used (encoding SEQ ID NO: 184). When expressed as a His-tagged recombinant protein, enzymatic activity is seen in vitro when using 2-nitrophenyl-β-D-galactopyranoside substrate, but not when using a 4-nitrophenyl-N-acetyl-β-D-glucosaminide substrate. The in vivo expression of spr0565 by pneumococci was monitored in nasal and lung washes, and was strongly upregulated.

[0872] The spr0867 antigen is annotated as endo-β-N-acetylglucosaminidase (LytB), which mediates cell separation during bacterial replication. The protein is surface-located, being a choline-binding protein [317], and immunoreactive sera have been seen in convalescent patients. The spr0867 sequence is 98.8% conserved between 22 different pneumococcal strains, and may thus offer broad protection. It has been reported as a protective immunogen when used alone [318]. Allelic variations are discussed in reference 319. The wild-type spr0867 gene is 2109 nucleotides long, but for immunisation purposes a 2040-mer fragment was used (encoding SEQ ID NO: 185).

[0873] The spr1098 antigen is annotated as sortase A (srtA), which anchors LPXTG motif proteins to the pneumococcal surface. The protein is membrane-located. The spr1098 sequence is 100% conserved between 22 different pneumococcal strains, and may thus offer broad protection. Further details on the polypeptide are given in references 320 & 321. There are no published studies on the protective efficacy of spr1098 as an immunogen. The wild-type spr1098 gene is 744 nucleotides long, but for immunisation purposes a 654-mer fragment was used (encoding SEQ ID NO: 187).

[0874] The spr1345 antigen is annotated as cell wall surface anchor family protein, an adhesin that binds to mucins. The protein is surface-located, being LPxTG-anchored. The spr1345 sequence is 100% conserved between 22 different pneumococcal strains, although different strains have different numbers of repeat sequences, and may thus offer broad protection. Further details on the polypeptide are given in reference 322. There are no published studies on the protective efficacy of spr1345 as an immunogen. The wild-type spr1345 gene is 609 nucleotides long, but for immunisation purposes a 495-mer fragment was used (encoding SEQ ID NO: 188).

[0875] The spr1416 antigen is annotated as a hypothetical protein, and seems to be cytoplasmic. It has an unknown function, but the spr1416 sequence is 100% conserved between 22 different pneumococcal strains, and may thus offer broad protection. There are no published studies on spr1416. The wild-type spr1416 gene is 387 nucleotides long, but for immunisation purposes a 381-mer fragment was used.

[0876] The spr1418 antigen is annotated as a conserved hypothetical protein. The protein is surface-located, based on the presence of a leader peptide. It has an unknown function, buy immunoreactive sera have been seen in convalescent pneumonia and meningitis patients. The spr1418 sequence is 99.8% conserved between 22 different pneumococcal strains, and may thus offer broad protection. There are no published studies on spr1418. The wild-type spr0481 gene is 780 nucleotides long, but for immunisation purposes a 705-mer fragment was used.

[0877] The spr1431 antigen is annotated as lysozyme (LytC), which mediates autolysis. The protein is surface-located, being LPxTG-anchored, and immunoreactive sera have been seen in convalescent pneumonia and meningitis patients. The spr1431 sequence is 98% conserved between 22 different pneumococcal strains, and may thus offer broad protection. Further details on the polypeptide are given in references 323 & 324. Some protection data with LytC are reported in reference 318. The wild-type spr1431 gene is 1506 nucleotides long, but for immunisation purposes a 1407-mer fragment was used (encoding SEQ ID NO: 189).

[0878] The spr1739 antigen is pneumolysin, a secreted cytoplasmic pore-forming toxin. Immunoreactive sera have been seen in convalescent pneumonia and meningitis patients. The spr1739 sequence is 100% conserved between 22 different pneumococcal strains, and may thus offer broad protection. Pneumolysin has previously been used in combination with CbpA (PspC) [325] or other antigens [2] for immunisation.

[0879] The spr2021 antigen is annotated as a secreted 45 kDa protein (PcsB). It is an essential hydrolase involved in the separation of dividing cells, and was initially identified because immunoreactive were seen in convalescent pneumonia and meningitis patients. The spr2021 sequence is 100% conserved between 22 different pneumococcal strains, and may thus offer broad protection. It has been confirmed as a leading vaccine candidate in reference 78. Further details on the PcsB polypeptide are given in references 326 & 327. The wild-type spr2021 gene is 1179 nucleotides long, but for immunisation purposes a 1098-mer fragment was used (encoding SEQ ID NO: 190).

[0880] One criterion for selecting these genes is their high level of conservation across a panel of 22 pneumococcal strain that includes representative strains from different pathogenic serogroups. There are several pneumococcal genes that are present in all of the current published genome sequences, with a high level of sequence identity, but that are absent in at least one strain in the panel. Thus current genomes can give a misleading impression that a particular gene is conserved. For example, a dicarboxylate/amino acid:cation (Na⁺ or H⁺) symporter (DAACS) family protein is present in the genomes of strains SP3-BS71, SP6-BS73, SP9-BS68, SP11-BS70, SP14-BS69, SP18-BS74, SP19-BS75, SP23-BS72, CGSP14, D39, R6 and TIGR4, but it is not seen in strains JJA and P1031.

[0881] Both spr0057 and spr0565 are surface-exposed exoglycosidases that deglycosylate host proteins. Both antigens are enzymatically active in vitro when expressed in His-tagged form, as shown using a substrate such as 4-nitrophenyl-N-acetyl-β-D-glucosaminide.

[0882] The spr0096, sprOS67, spr1431 and spr2021 antigens may all be peptidoglycan hydrolases.

[0883] Efficacy Testing

[0884] Various model systems of pneumococcal disease were used for testing efficacy of the immunogens.

[0885] In a mouse model of intraperitoneal infection, antigens were administered intraperitoneally and the challenge was intraperitoneal. Six-week-old, specific-pathogen-free female BALB/c mice were immunized intraperitoneally on days 0, 14, and 28. Immunizations were done using single recombinant proteins (20 μg/mouse) or with a combination of them (10 μg each/mouse), along with aluminium hydroxide or Freund's adjuvant. Controls received identical courses of saline plus adjuvant. Mice were then challenged intraperitoneally with a lethal dose of a homologous or heterologous strain (D39, TIGR4, SP-PD, PT131, Strep-5, 35Bsme15). The bacterial dosages used were generally: 5×10⁵ CFU/mouse of D39, about 10² CFU/mouse of TIGR4, or aout 5.4×10⁴ CFU/mouse of SP-PD. In some cases, similar experiments were carried out in CD1 mice, adjusting the challenging dose to achieve infection and mortality. Efficacy of immunisation is tested by evaluating the effect of vaccination on bacteremia (at 5 and/or 24 hours post infection) and mortality (monitored for 10 days following bacterial challenge or longer, depending on the infecting strain).

[0886] In a passive transfer model, sera against the recombinant proteins were administered intraperitoneally and challenge was intraperitoneal. Antisera were developed in mice immunized intraperitoneally as described above. 10-week-old BALB/c mice received 50 μl of immune serum intraperitoneally 15 min before challenge. Controls received identical courses of saline plus adjuvant. Mice were then challenged intraperitoneally.

[0887] In a model of intravenous infection, antigens were administered intraperitoneally and the challenge was intravenous. Five-week-old CD-1 mice were immunized intraperitoneally on days 0, 14, and 28. Immunizations were done using recombinant proteins individually (20 μg/mouse) or with a combination of them (10 μg each/mouse), along with Freund's adjuvant. Controls received identical courses of saline plus adjuvant. Mice were then challenged intravenously with a lethal dose of a homologous or heterologous strain (D39 or TIGR-4). The bacterial dosages used were: about 10⁵ CFU/mouse of D39, 2×10⁶ CFU/mouse of TIGR-4, about 10⁷ CFU/mouse of PT131, about 10⁴ CFU/mouse of Strep-5, about 2×10⁷ CFU/mouse of 35Bsme15. Efficacy of vaccine candidates is tested by evaluating the effect of vaccination on bacteremia (at 48 hours post-infection) and mortality (monitored for 10 days following bacterial challenge or longer, depending on the infecting strain)).

[0888] In a model of intranasal infection, antigens were administered intranasally, and the challenge was intranasal. Six-week-old, C57BL/6 mice were immunized intranasally on days 0, 16 and 32. Immunizations were done using recombinant proteins (20 μg/mouse) along with LTK63 adjuvant. Controls received identical courses of LTK63 or PBS. Mice were challenged with 10⁶ CFU TIGR4. Efficacy of vaccine candidates is tested by evaluating the effect of vaccination on mortality (monitored for 2-3 weeks following bacterial challenge) and on nasopharyngeal colonization and lung infection. Other experiments were carried out with different mouse and bacterial strains and administering the antigens either mucosally or systemically.

[0889] Immunogenicity and Protection Studies with Individual Antigens

[0890] The following antigens were individually tested in a mouse model: spr0057; spr0286; spr0565; spr0867; spr1098; spr1345; spr1416; spr1418; spr1431; and spr2021. The spr2086 antigen was split into two domains and tested as spr2086A and spr2086B. The antigens were adjuvanted with Freund's adjuvant and tested in CD1 and/or BALB/c mice. Challenge was with either the D39 or TIGR4 strain of pneumococcus, by either an intravenous (i.v.) or intraperitoneal (i.p.) route. Each group included at least 8 mice. A control group received adjuvant in phosphate-buffered saline. The TIGR4 strain is very virulent, and so protection against challenge by this strain indicates a high level of efficacy.

[0891] In terms of bacteremia, results were determined by measuring CFU/ml in the blood of immunised and control animals, 24 hours after challenge. In addition, the numbers of infected animals in both groups were compared using the one-tailed Mann-Whitney U-test. Results were as follows:

| | | | Challenge | CFU/ml (geometric mean) | | | Number infected | | |
|---|---|---|---|---|---|---|---|---|---|
| Ag | Mice | Strain | Route | Test | Control | Ratio | Test | Control | P |
| 0057 | CD1 | D39 | i.v. | 6.15E+03 | 9.22E+04 | 15.0 | 11/9 | 5/15 | 0.064 |
| 0057 | BALB/c | D39 | i.p. | 1.77E+05 | 5.76E+06 | 32.5 | 2/8 | 0/9 | 0.056 |
| 0286A | CD1 | D39 | i.v. | 1.25E+02 | 1.70E+04 | 135.2 | 19/1 | 10/10 | 0.005 |
| 0286B | BALB/c | D39 | i.p. | 6.26E+02 | 5.38E+04 | 85.9 | 3/5 | 1/6 | 0.027 |
| 0565 | CD1 | D39 | i.v. | 2.44E+02 | 8.00E+04 | 327.6 | 15/5 | 5/15 | 0.0002 |
| 0867 | CD1 | D39 | i.v. | 2.97E+03 | 9.16E+04 | 30.9 | 6/4 | 3/7 | 0.095 |
| 1098 | CD1 | D39 | i.v. | 2.49E+03 | 3.47E+05 | 139.6 | 6/4 | 3/7 | 0.062 |
| 1098 | BALB/c | D39 | i.p. | 9.91E+03 | 4.18E+06 | 421.3 | 3/4 | 0/8 | 0.007 |
| 1098 | BALB/c | TIGR4 | i.p. | 1.06E+03 | 1.91E+05 | 180.9 | 4/4 | 0/8 | 0.007 |
| 1345 | CD1 | D39 | i.v. | 4.24E+02 | 1.77E+05 | 417.7 | 7/3 | 4/6 | 0.038 |
| 1345 | BALB/c | D39 | i.p. | 5.87E+03 | 7.99E+05 | 136.1 | 1/7 | 0/16 | 0.011 |
| 1416 | BALB/c | TIGR4 | i.p. | 5.56E+04 | 1.66E+06 | 29.8 | 0/8 | 1/15 | 0.077 |
| 1418 | BALB/c | D39 | i.p. | 6.53E+03 | 7.99E+05 | 122.4 | 2/6 | 0/16 | 0.004 |
| 1431 | CD1 | D39 | i.v. | 4.68E+02 | 2.74E+05 | 585.5 | 13/7 | 6/14 | 0.002 |
| 2021 | CD1 | D39 | i.v. | 1.63E+04 | 6.05E+04 | 3.7 | 10/10 | 6/14 | >0.1 |
| 2021 | BALB/c | TIGR4 | i.p. | 1.69E+05 | 1.19E+06 | 7.1 | 0/8 | 1/15 | 0.040 |

[0892] In terms of survival, results were determined by measuring the median survival (in days) per group. In addition, the numbers of surviving animals in both groups were compared using a one-tailed Mann-Whitney U-test. Results are in the following table. In addition, the number of mice surviving was followed over time, and an example of such data is shown in FIG. 1.

| | | | | Survival (days) | | Alive/dead | | |
|---|---|---|---|---|---|---|---|---|
| Ag | Mice | Strain | Route | Test | Control | Test | Control | P |
| 0057 | CD1 | D39 | i.v. | >10.5 | 5.5 | 11/9 | 5/15 | 0.064 |
| 0057 | BALB/c | D39 | i.p. | 4 | 2.5 | 3/7 | 0/9 | 0.067 |
| 0286A | CD1 | D39 | i.v. | >10.5 | 7.5 | 17/3 | 9/11 | 0.006 |
| 0286B | BALB/c | D39 | i.p. | 8 | 5.5 | 4/4 | 2/5 | >0.1 |
| 0565 | CD1 | D39 | i.v. | >10.5 | 5 | 14/6 | 6/14 | 0.002 |
| 0867 | CD1 | D39 | i.v. | >11.5 | 6.5 | 6/4 | 3/7 | >0.1 |
| 1098 | CD1 | D39 | i.v. | >10.5 | 6 | 6/4 | 3/7 | >0.1 |
| 1098 | BALB/c | D39 | i.p. | 5.5 | 4.5 | 3/4 | 1/7 | >0.1 |
| 1098 | BALB/c | TIGR4 | i.p. | 6.5 | 2.5 | 3/5 | 1/7 | 0.032 |
| 1345 | CD1 | D39 | i.v. | >10.5 | 4.5 | 8/2 | 3/7 | 0.018 |
| 1345 | BALB/c | D39 | i.p. | 4.5 | 4 | 3/5 | 3/13 | >0.1 |
| 1416 | BALB/c | TIGR4 | i.p. | 3 | 1.5 | 2/6 | 1/15 | 0.086 |
| 1418 | BALB/c | D39 | i.p. | 5.5 | 4 | 3/5 | 3/13 | >0.1 |
| 1431 | CD1 | D39 | i.v. | >10.5 | 4.5 | 15/5 | 6/14 | 0.002 |
| 2021 | CD1 | D39 | i.v. | >10.5 | 4.5 | 11/9 | 4/17 | 0.061 |
| 2021 | BALB/c | TIGR4 | i.p. | 2 | 1.5 | 2/6 | 0/16 | >0.1 |

[0893] For all tested antigens, therefore, there was a substantial reduction in bacteremia and/or an increase in survival.

[0894] In summary, four preferred antigens are effective against serotype 2, 3, 4 and 35B strains as follows:

| | | | | |
|---|---|---|---|---|
| OPKA | Type 2 | Type 3 | Type 4 | Type 35 |

| | | | | | |
|---|---|---|---|---|---|
| spr0057 | +/− | ++ | − | + | − |
| spr0096 | + | + | ++ | + | ++ |
| spr0565 | + | ++ | ++ | ++ | − |
| spr2021 | ++ | +/− | − | +/− | ? |

[0895] Although serotype 4 is covered by current conjugate vaccines, serotypes 2, 3 and 35B are not.

[0896] Immunogenicity and Protection Studies with Combined Antigens

[0897] The following combinations of antigens were tested in the same mouse model as individual antigens: (1) spr0057+spr0096+spr2021; (2) spr0057+spr0096+spr2021; (3) spr0057+spr0096+spr2021; (4) spr0057+spr2021; (5) spr0057+spr0565+spr2021. In addition, a control group (0) was immunised with a combination of PspC and a detoxified pneumolysin (‘Ply-detox’) [325], and a group (6) received a combination of spr0565+spr2021+Ply-detox. Results were as follows:

| | CFU/ml (geometric mean) | | | Number infected | | | Survival | | Alive/dead | | |
|---|---|---|---|---|---|---|---|---|---|---|---|
| | Test | Control | Ratio | Test | Ctrl | P | Test | Ctrl | Test | Ctrl | P |
| 0 | 1.70E+05 | 9.60E+06 | 56.5 | 4/26 | 0/30 | 0.009 | 4.5 | 1 | 12/18 | 2/28 | <0.001 |
| 1 | 4.21E+03 | 1.19E+06 | 283.4 | 0/8 | 1/15 | 0.001 | >10.5 | 4 | 6/2 | 0/16 | <0.001 |
| 2 | 3.87E+04 | 1.40E+06 | 36.2 | 2/6 | 1/7 | 0.065 | 5 | 1.5 | 3/5 | 2/6 | >0.1 |
| 3 | 1.18E+03 | 4.21E+04 | 35.5 | 7/3 | 3/7 | 0.062 | >10.5 | 7 | 7/3 | 3/7 | >0.1 |
| 4 | 1.07E+04 | 3.44E+05 | 32.0 | 1/7 | 1/15 | 0.014 | 5.5 | 1.5 | 2/6 | 3/13 | 0.019 |
| 5 | 3.48E+02 | 4.21E+04 | 120.8 | 7/3 | 3/7 | 0.026 | >10.5 | 7 | 8/2 | 3/7 | 0.018 |
| 6 | 1.62E+03 | 3.16E+05 | 194.6 | 7/3 | 1/9 | 0.014 | >10.5 | 3.5 | 7/3 | 1/9 | 0.014 |

[0898] Bacteremia data for groups 0, 1, 4 and 6 are shown in FIG. 3. Survival data for the same groups are shown in FIG. 4. Survival data for groups 1 and 5 are shown in FIG. 2.

[0899] In further experiments, mice received (7) spr0565+spr2021 or (8) spr2021+Ply-detox. Survival data for groups 6, 7 and 8 are in FIG. 5.

[0900] In further experiments, mice received a combination of spr0565, PmP and spr2021. Sera were tested in the opsonophagocytic killing assay (OPKA). Results are in FIG. 27. A 10,000-fold dilution was required before the immune serum's activity declined to control levels.

[0901] Combo-1 to Combo-4

[0902] Four different antigen combinations were prepared:
[0903] Combo-1: spr0057+spr0096+spr2021.
[0904] Combo-2: spr0057+spr0565+spr2021.
[0905] Combo-3: spr0057+spr0096+spr0565.
[0906] Combo-4: spr0057+spr0096+spr0565+spr2021.

[0907] Rabbit were immunised and their immune sera were transferred into BALB/c mice to test for passive protection against the TIGR4 strain.

[0908] Mice were also immunised and then tested in challenge models using strains including TIGR4 (i.p. challenge) and D39, PT131 & TREP6A (i.v. challenge). The TIGR4 strain is serotype 4, which is covered by Prevnar™ (‘VT’ strains), but the other 3 strains are serotypes 2, 3 and 6A, which are not covered by Prevnar™ (‘NVT’ strains). Serotypes 3, 4 and 6A are covered by proposed 13-valent saccharide vaccines [328], but serotype 2 strains are not.

[0909] FIGS. 6 and 7 show the results obtained in the passive transfer test. Combo-1 and combo-2 gave at least a log reduction in bacteremia (FIG. 6) and resulted in a survival time of at least 10 days (FIG. 7). Efficacy was not improved by increasing dosing to 50 μg of each antigen.

[0910] FIGS. 8 & 9 show results obtained in the challenge model using strain PT131. Combo-1 and combo-2 were again effective, with combo-2 being superior.

[0911] FIGS. 10 & 11 show results obtained in the challenge model using 1.1×10⁴ CFU of strain STREP-5 after immunisation with combo-1.

[0912] FIG. 12 shows the reduction in CFU/ml 24 hours after challenge with OREP-3. Combo-1 and combo-2 are both effective.

[0913] FIGS. 13 & 14 shows results obtained after challenge of combo-2-immunised mice with TREP-6A.

[0914] As shown in FIG. 17, combo-1 decreases bacteremia after a high-dose (1.1×10⁷ cfu) intranasal challenge with TIGR4, although nasal colonisation and lung infection were not affected. Using a sub-lethal intranasal challenge at late stage of infection, FIGS. 18-22 show that combo-1 is effective.

[0915] Efficacy against intranasal challenge with 14-Spain-15 strain is shown in FIGS. 23 (nasal wash, 48 hours) & 24 (lung wash, 48 hours).

[0916] FIG. 25 summarises mortality after challenge with TIGR-4 (i.p. challenge; FIG. 25A) or with D39, PT131 or TREP6A (i.v. challenge; FIG. 25B) following immunisation with combo-2.

[0917] Thus immunisation with combo-1 or combo-2 is effective against infection by a wide variety of pneumococcal strains.

[0918] FIG. 26 shows OPKA results obtained in the using serum from control animals or from animals immunised with combo-1 or combo-2. Large increases in OPKA activity are seen using combo-2 at both a 1/12 and 1/36 dilution.

[0919] Combo-1 was modified by addition of spr1416, spr1418 or spr1431. As shown in FIGS. 15 & 16, combo-1 maintains its efficacy against TIGR4 challenge even when these three antigens are added.

[0920] Combo-1, which includes three antigens, was also compared to a combination of two of those three antigens (spr0057+spr2021) using intranasal immunisation and intranasal challenge. Although the two combinations showed little difference in terms of mortality or bacteremia (after both 24 hours and 10 days) using TIGR4 as a challenge strain, nasal and lung washes after 10 days showed significant reductions (FIGS. 33 and 34). Good results were also seen when using 14-Spain15 as the challenge strain (FIGS. 35 and 36).

[0921] Combo-1 was also compared to spr0565 alone. Although spr0565 reduced bacteremia after 24 hours, after 48 hours the effect was not seen. In contrast, the efficacy of combo-1 became apparent only after 48 hours. No efficacy was seen against nasal colonization or lung infection.

[0922] In summary, the best representative results with combo-1 were as follows:

| | | | Bacteremia | | | Survival | | |
|---|---|---|---|---|---|---|---|---|
| Challenge | | | Geom. mean CFU | | U-test | median days | | U-test |
| Serotype-strain | route | dose | Combo | Control | P | Combo | Control | P |
| 02-D39 | ip | 1.1E+03 | 1.9E+04 | 1.1E+05 | 0.253 | 6.25 | 1.5 | 0.097 |
| 02-D39 | iv | 2.1E+05 | 3.4E+04 | 4.5E+06 | 0.038 | 9 | 2.5 | 0.022 |
| 03-OREP3 | ip | 4.5E+03 | 1.7E+03 | 2.5E+04 | <0.001 | 2.5 | 2.5 | 0.117 |
| 04-TIGR4 | in | 4.5E+06 | 1.2E+02 | 8.5E+02 | 0.164 | — | — | — |
| 04-TIGR4 | in | 1.1E+07 | 7.9E+03 | 2.1E+05 | 0.047 | — | — | — |
| 04-TIGR4 | ip | 1.1E+02 | 4.2E+03 | 1.2E+06 | 0.001 | 10.5 | 1.5 | <0.001 |
| 04-TIGR4 | ip | 1.5E+02 | 1.6E+04 | 3.4E+05 | 0.053 | 5.5 | 1.5 | 0.096 |
| 04-TIGR5 | ip | 7.0E+01 | 1.5E+02 | 2.6E+05 | <0.001 | 10.5 | 1.5 | 0.025 |
| 04-TIGR4 | iv | 3.2E+06 | 1.1E+04 | 4.1E+06 | 0.007 | 11.5 | 5 | 0.018 |
| 05-STREP5 | iv | 1.1E+04 | 4.4E+03 | 7.7E+04 | 0.045 | 6.5 | 4.5 | 0.036 |
| 06B-Finland12 | ip | 5.0E+04 | 6.6E+03 | 5.2E+06 | 0.001 | 5.5 | 1.5 | 0.164 |
| 19F-5167 | iv | 7.0E+07 | 7.8E+03 | 1.5E+05 | 0.032 | 7.5 | 3.5 | 0.062 |
| 35B-SME15 | iv | 4.5E+07 | 1.3E+04 | 1.8E+05 | 0.083 | 9 | 5.5 | 0.095 |

[0923] In summary, the best representative results with combo-2 were as follows:

| | | | Bacteremia | | | Survival | | |
|---|---|---|---|---|---|---|---|---|
| Challenge | | | Geom. mean CFU | | U-test | median days | | U-test |
| Serotype-strain | route | Dose | Combo | Control | P | Combo | Control | P |
| 02-D39 | iv | 1.6E+05 | 3.5E+02 | 4.2E+04 | 0.026 | 10.5 | 7 | 0.018 |
| 03-OREP3 | ip | 4.5E+03 | 2.0E+03 | 2.5E+04 | 0.019 | 3.5 | 2.5 | 0.005 |
| 03-PT131 | iv | 9.0E+06 | 2.5E+02 | 8.3E+03 | 0.003 | 10.5 | 7 | 0.012 |
| 04-TIGR4 | ip | 1.5E+02 | 6.3E+02 | 6.5E+04 | 0.007 | 10.5 | 2.5 | 0.005 |
| 04-TIGR5 | ip | 7.0E+01 | 1.1E+03 | 3.9E+04 | 0.032 | 10.5 | 9 | 0.139 |
| 04-TIGR4 | iv | 2.8E+06 | 2.3E+03 | 1.8E+04 | 0.176 | 9.5 | 5.5 | 0.158 |
| 05-STREP5 | iv | 9.0E+03 | 1.7E+04 | 1.1E+05 | 0.083 | 6.5 | 5.5 | 0.072 |
| 06A-TREP-6A | iv | 3.5E+07 | 1.8E+05 | 7.7E+07 | 0.007 | 10.5 | 2.5 | 0.004 |
| 06B-Finland12 | ip | 5.0E+04 | 5.7E+05 | 5.2E+06 | 0.014 | 1.5 | 1.5 | 0.191 |
| 35B-SME15 | iv | 6.8E+07 | 2.7E+04 | 1.1E+06 | 0.045 | 6.5 | 5 | 0.095 |

[0924] In summary, the best representative results with combo-4 were as follows:

| | | | Bacteremia | | | Survival | | |
|---|---|---|---|---|---|---|---|---|
| Challenge | | | Geom. mean CFU | | U-test | median days | | U-test |
| Serotype-strain | route | dose | Combo | Control | P | Combo | Control | P |
| 02-D39 | iv | 2.3E+05 | 1.9E+04 | 3.3E+06 | 0.032 | 8.5 | 3.5 | 0.053 |
| 03-OREP3 | ip | 4.5E+03 | 9.3E+02 | 2.5E+04 | 0.032 | 3.5 | 2.5 | 0.005 |
| 03-PT131 | iv | 9.0E+06 | 5.8E+02 | 5.1E+03 | 0.045 | 10.5 | 6.5 | 0.176 |
| 04-TIGR4 | ip | 1.4E+02 | 2.6E+02 | 7.9E+03 | 0.041 | 10.5 | 7 | 0.052 |
| 04-TIGR4 | iv | 3.5E+06 | 4.8E+03 | 1.7E+05 | 0.072 | 10 | 6.5 | 0.095 |
| 05-STREP5 | iv | 8.5E+03 | 2.2E+03 | 3.7E+04 | 0.083 | 9 | 6.5 | 0.109 |

[0925] Thus the combinations provide good protection from bacteremia and increase survival.

[0926] Intranasal Immunisation of Mice with Pilus Antigens

[0927] A mouse model was used to characterize the protective potential of pneumococcal pilus RrgA, RrgB and RrgC proteins. Intranasal immunization of recombinant pilus proteins combined with the non-toxic E. coli heat-labile enterotoxin mutant LTK63 as adjuvant evoked IgA and IgG-responses in serum. Furthermore, immunization with the major pilus component (RrgB) led to decreased bacterial load of the invasive TIGR4 strain in the nasopharynx, lungs and blood and yielded a 5-fold increase in survival. There was no effect on asymptomatic nasopharyngeal carriage of a non-invasive strain, pointing to restriction of the observed protective effect to a fulminant infection.

[0928] Six-week old female C57BL/6 mice were intranasally immunized 3 times (2-week interval) with 10 μl PBS containing either 20 μg of recombinant RrgA, RrgB or RrgC or a mix of 10 μg of each. Proteins had an affinity tag and used the sequence from the TIGR4 strain. All protein solutions were administered together with 2 μg of LTK63. Controls received 2 μg of LTK63 in PBS, or only PBS. One week after the final immunization serum samples were taken in order to determine antibody titres by ELISA. Mice were challenged intranasally with 0.5−1×10⁷ cfu/mouse of invasive TIGR4 pneumococci or the colonizing serotype 19F strain. Mice were sacrificed after exceeding a defined clinical score as approved by the local committee for animal experiments. Seven to nine days post-infection the surviving mice were sacrificed. Blood samples, the lungs and a nasopharyngeal-tracheal flush sample were retrieved. Viable bacteria were quantified by serial plating of blood samples. The lungs were weighted, homogenized in PBS containing protease inhibitor cocktail and used for the quantification of viable bacteria. To determine the number of bacteria in the upper respiratory tract, the nasopharyngeal-trachea was lavaged post mortem with 30 μl of PBS by inserting a 20-gauge catheter into the proximal trachea and collecting the flush from the nostrils and performed serial plating. A camera was used to determine the colonization in a non-invasive manner by determining the luminescence intensity in the nasopharynx, lungs, ears and bloodstream of anesthetized mice. A threshold of 300 p/sec/cm²/sr in the nasal area was considered as being sufficient for indicating successful colonization.

[0929] Intranasal immunization with pilus proteins evoked a systemic IgA and IgG response. Serum titres of IgA showed that mice immunized with individual pilus proteins mounted an IgA response to the respective antigens. No response to the other two proteins was observed, showing that individual pilus proteins do not elicit cross-reactive antibodies. Mice immunized with all 3 proteins had serum IgA levels comparable to the single immunizations although antibody levels to RrgA were lower. Similar results were obtained for IgG serum levels. In short, an immune response, comprising both IgA and IgG, is mounted after intranasal immunization with any of the three pilus proteins but not with the controls.

[0930] After immunization mice were infected intranasally with a high dose of the invasive TIGR4 strain. Analysing the survival rates showed significant differences between the different groups. Only 10% of the PBS-immunized and 20% of the LTK63-immunized mice survived the challenge. Mice had bacterial counts of 1×10⁵-10⁹ bacteria per ml of blood and most of those mice succumbed to pneumococcal disease within 96 hours post-infection. Immunization with RrgB plus LTK63 increased survival from 10% (in the control group of PBS-immunized mice) to 55% (p=0.0001). Also survival compared to the group receiving only the adjuvant was significantly increased (p=0.016). A vaccine mixture of RrgA, RrgB and RrgC showed the same protection as vaccination with RrgB alone (p=0.002, increased survival from 10% to 45% compared to PBS-immunized mice). Furthermore bacterial counts in the bloodstream, lungs and nasopharynx were significantly reduced in RrgB-immunized mice compared to the control groups. Compared to PBS-immunized mice, median bacterial numbers were reduced from 1.5×10⁶ cfu/ml to 1.0×10⁰ cfu/ml (p=0.067) in the bloodstream, from 5×10⁴ cfu/mg tissue to 1.5×10¹ cfu/mg tissue (p=0.001) in the lungs and from 7×10³ to 4.5×10² (p=0.0002) in the nasopharynx. Thus mice immunized with TIGR4-based RrgB proteins together with the mucosal adjuvant LTK63 showed a significant increase in survival after intranasal challenge with TIGR4 as compared to non-vaccinated control mice.

[0931] The immunization did not lead to enhanced clearance of colonizing pneumococci from the nasopharynx. Unlike TIGR4, a serotype 19F strain of sequence type 162 was previously shown to be non-invasive even after a high dose intranasal challenge. This hyper-colonizing strain expresses pili belonging to the same Glade as TIGR4. Only 1 amino acid (A645V) differs in the RrgB protein between the two strains. RrgB-immunized mice were challenged with this 19F strain, also engineered to express luciferase. Control groups received LTK63 or PBS, only. Serum IgG and IgA against RrgB was determined by ELISA and values were similar to those seen in the previous experiments. Mice became colonized with intermittent occurrence of mostly subclinical otitis media or pneumonia. Colonization was determined 24-216 hours post infection. For the PBS-treated control group the percentage of colonized mice varied between 25% (48 h p.i) and 70% (96 h p.i.). The initial low colonization rate increased over time with a final clearance event taking effect after 96 hours.

[0932] The same observations were made for the LTK63- and RrgB-immunized mice, but with a shift towards a ˜24-hour earlier clearance. No significant difference in colonization- and/or clearance-events could be observed between control and RrgB-immunized mice. Occurrence of otitis media and pneumonia was generally low, with a maximum of 10% occurrence in each group. No significant difference between the groups could be established. Finally bacterial counts in the nasopharynx were determined upon sacrifice of the animals 9 days post-infection. Mice of all three groups showed similar amounts of bacteria in the nasopharynx (2.8-4.4×10³ per wash). A peak of colonization was observed around 96 hours post-infection.

[0933] Hybrid Polypeptides

[0934] Hybrids have been made with pairs of spr0057, spr0096, spr0565 (optionally in the spr0565A or spr0565B form), spr2021 and RrgA. Various pairings have been constructed, expressed and purified. For example, FIG. 32 includes two gels showing purified (>1 mg/ml, ≧80% pure) spr2021-spr0096 and spr0096-spr2021, both with a molecular weight of ˜61 kDa. Although both hybrids could be expressed and purified in soluble form, the spr2021-spr0096 hybrid was much more soluble than the spr0096-spr2021 hybrid.

[0935] The following hybrid sequences (having formula NH₂-A-{-X-L-}₂-B—COOH) have been prepared:

| | | | | | | SEQ |
|---|---|---|---|---|---|---|
| A | X₁ | L₁ | X₂ | L₂ | B | ID |
| M | spr2021 | SEQ ID 233 | spr0057 | LE | His₆ | 193 |
| M | spr2021 | SEQ ID 233 | spr0096 | LE | His₆ | 194 |
| M | spr2021 | SEQ ID 233 | spr0565 | SEQ ID 235 | His₆ | 195 |
| M | spr2021 | SEQ ID 233 | spr0565A | SEQ ID 235 | His₆ | 196 |
| M | spr2021 | SEQ ID 233 | spr0565B | SEQ ID 235 | His₆ | 197 |
| MAS | spr2021 | SEQ ID 233 | RrgA | LE | His₆ | 198 |
| M | spr0057 | SEQ ID 233 | spr2021 | SEQ ID 235 | His₆ | 199 |
| M | spr0057 | SEQ ID 233 | spr0096 | LE | His₆ | 200 |
| M | spr0057 | SEQ ID 233 | RrgA | LE | His₆ | 201 |
| M | spr0057 | SEQ ID 233 | spr0565 | SEQ ID 235 | His₆ | 202 |
| M | spr0057 | SEQ ID 233 | spr0565A | SEQ ID 235 | His₆ | 203 |
| M | spr0057 | SEQ ID 233 | spr0565B | SEQ ID 235 | His₆ | 204 |
| M | spr0096 | SEQ ID 233 | spr2021 | SEQ ID 235 | His₆ | 205 |
| M | spr0096 | SEQ ID 233 | spr0057 | LE | His₆ | 206 |
| M | spr0096 | SEQ ID 233 | RrgA | LE | His₆ | 207 |
| M | spr0096 | SEQ ID 233 | spr0565 | SEQ ID 235 | His₆ | 208 |
| M | spr0096 | SEQ ID 233 | spr0565A | SEQ ID 235 | His₆ | 209 |
| M | spr0096 | SEQ ID 233 | spr0565B | SEQ ID 235 | His₆ | 210 |
| MAS | RrgA | SEQ ID 233 | spr2021 | SEQ ID 235 | His₆ | 211 |
| MAS | RrgA | SEQ ID 233 | spr0565 | SEQ ID 235 | His₆ | 212 |
| MAS | RrgA | SEQ ID 233 | spr0565A | SEQ ID 235 | His₆ | 213 |
| MAS | RrgA | SEQ ID 233 | spr0565B | SEQ ID 235 | His₆ | 214 |
| MAS | RrgA | SEQ ID 233 | spr0057 | LE | His₆ | 215 |
| MAS | RrgA | SEQ ID 233 | spr0096 | LE | His₆ | 216 |
| MAS | spr0565 | SEQ ID 233 | spr0057 | SEQ ID 235 | His₆ | 217 |
| MAS | spr0565A | SEQ ID 233 | spr0057 | SEQ ID 235 | His₆ | 218 |
| MAS | spr0565B | SEQ ID 233 | spr0057 | LE | His₆ | 219 |
| MAS | spr0565 | SEQ ID 233 | spr0096 | LE | His₆ | 220 |
| MAS | spr0565A | SEQ ID 233 | spr0096 | LE | His₆ | 221 |
| MAS | spr0565B | SEQ ID 233 | spr0096 | LE | His₆ | 222 |
| MAS | spr0565 | SEQ ID 233 | spr2021 | SEQ ID 235 | His₆ | 223 |
| MAS | spr0565A | SEQ ID 233 | spr2021 | SEQ ID 235 | His₆ | 224 |
| MAS | spr0565B | SEQ ID 233 | spr2021 | SEQ ID 235 | His₆ | 225 |
| MAS | spr0565 | SEQ ID 233 | RrgA | LE | His₆ | 226 |
| MAS | spr0565A | SEQ ID 233 | RrgA | LE | His₆ | 227 |
| MAS | spr0565B | SEQ ID 233 | RrgA | LE | His₆ | 228 |

[0936] The X₁ and X₂ moieties of these hybrids can be used in further hybrids.

[0937] As mentioned above, spr0057 polypeptide shows enzymatic activity using a 4-nitrophenyl-N-acetyl-β-D-glucosaminide substrate. This enzymatic activity was retained in various hybrid polypeptides (spr0096-spr0057; spr2021-spr0057; spr0057-spr2021; and spr0057-spr0096).

[0938] A combination of spr0057 and spr0096 was compared to a hybrid polypeptide spr0057-spr0096 in immunological tests. As shown in FIGS. 28-31, the hybrid showed equal or better efficacy than the combination. The biggest difference was seen in mortality after i.p. immunisation and subsequent i.v. challenge with TIGR4 using 5.8×10⁶ cfu (FIG. 31).

[0939] It will be understood that the invention has been described by way of example only and modifications may be made whilst remaining within the scope and spirit of the invention.

### REFERENCES

[0940] [1] WO02/22168.
[0941] [2] Ogunniyi et al. (2007) Infect Immun. 75(1):350-7.
[0942] [3] WO02/079241
[0943] [4] WO02/34773.
[0944] [5] WO00/06737.
[0945] [6] WO00/06738.
[0946] [7] WO00/58475.
[0947] [8] WO2003/082183.
[0948] [9] Bagnoli et al. (2008) J Bacteriol. 190(15):5480-92.
[0949] [10] WO2004/092209.
[0950] [11] Research Disclosure, 453077 (January 2002).
[0951] [12] EP-A-0372501.
[0952] [13] EP-A-0378881.
[0953] [14] EP-A-0427347.
[0954] [15] WO93/17712.
[0955] [16] WO94/03208.
[0956] [17] WO98/58668.
[0957] [18] EP-A-0471177.
[0958] [19] WO91/01146.
[0959] [20] Falugi et al. (2001) Eur J Immunol 31:3816-3824.
[0960] [21] Baraldo et al. (2004) Infect Immun 72(8):4884-7.
[0961] [22] EP-A-0594610.
[0962] [23] Ruan et al. (1990) J Immunol 145:3379-3384.
[0963] [24] WO00/56360.
[0964] [25] Kuo et al. (1995) Infect Immun 63:2706-13.
[0965] [26] Michon et al. (1998) Vaccine. 16:1732-41.
[0966] [27] WO02/091998.
[0967] [28] WO01/72337.
[0968] [29] WO00/61761.
[0969] [30] WO00/33882
[0970] [31] WO2007/071707
[0971] [32] WO99/42130.
[0972] [33] U.S. Pat. No. 4,761,283.
[0973] [34] U.S. Pat. No. 4,356,170.
[0974] [35] U.S. Pat. No. 4,882,317.
[0975] [36] U.S. Pat. No. 4,695,624.
[0976] [37] Mol. Immunol., 1985, 22, 907-919 [38] EP-A-0208375.
[0977] [39] Bethell G. S. et al., J. Biol. Chem., 1979, 254, 2572-4
[0978] [40] Hearn M. T. W., J. Chromatogr., 1981, 218, 509-18
[0979] [41] WO00/10599.
[0980] [42] Gever et al., Med. Microbiol. Immunol, 165: 171-288 (1979).
[0981] [43] U.S. Pat. No. 4,057,685.
[0982] [44] U.S. Pat. Nos. 4,673,574; 4,761,283; 4,808,700.
[0983] [45] U.S. Pat. No. 4,459,286.
[0984] [46] U.S. Pat. No. 4,965,338.
[0985] [47] U.S. Pat. No. 4,663,160.
[0986] [48] WO2007/000343.
[0987] [49] Vaccines. (eds. Plotkin & Orenstein). 4th edition, 2004, ISBN: 0-7216-9688-0.
[0988] [50] Rappuoli et al. (1991) TIBTECH 9:232-238.
[0989] [51] Kirkham et al. (2006) Infect Immun. 74(1):586-93.
[0990] [52] WO2005/108580.
[0991] [53] Berry et al. (1999) Infect Immun 67(2):981-5.
[0992] [54] U.S. Pat. No. 6,716,432.
[0993] [55] WO90/06951.
[0994] [56] WO99/03884.
[0995] [57] Baba et al. (2002) Infect Immun 70: 107-113.
[0996] [58] U.S. Pat. No. 7,217,791
[0997] [59] WO2008/061953.
[0998] [60] Cao et al. (2007) Vaccine 25(27):4996-5005.
[0999] [61] WO2005/063283.
[1000] [62] WO2003/104272.
[1001] [63] WO00/37105.
[1002] [64] Adamou et al. (2001) Infect Immun. 69(2):949-58.
[1003] [65] WO98/18930.
[1004] [66] WO99/53940.
[1005] [67] WO02/22167.
[1006] [68] WO02/08426.
[1007] [69] WO01/12219.
[1008] [70] Briles et al. (2000) J Infect Dis 182:1694-1701.
[1009] [71] Talkington et al. (1996) Microb Pathog. 21(1):17-22.
[1010] [72] WO00/76540.
[1011] [73] Bethe et al. (2001) FEMS Microbiol Lett. 205(1):99-104.
[1012] [74] WO01/81380.
[1013] [75] Brown et al. (2001) Infect Immun 69:6702-6.
[1014] [76] Whalan et al. (2005) FEMS Immunol Med Microbiol 43:73-80.
[1015] [77] Jomaa et al. (2006) Vaccine. 24(24):5133-9.
[1016] [78] Giefing et al. (2008) J Exp Med 205:117-131.
[1017] [79] WO2007/116322.
[1018] [80] LeMieux et al. (2006) Infect Immun 74:2453-6.
[1019] [81] Nelson et al. (2007) Mol Microbiol 66:329-40.
[1020] [82] U.S. Pat. No. 5,707,829
[1021] [83] Current Protocols in Molecular Biology (F. M. Ausubel et al. eds., 1987) Supplement 30.
[1022] [84] Hoskins et al. (2001) J. Bacteriol. 183:5709-5717.
[1023] [85] GenBank NC_{—}004512.
[1024] [86] GenBank NC_{—}003440.
[1025] [87] GenBank NC_{—}003028.
[1026] [88] Tettelin et al. (2001) Science 293:498-506.
[1027] [89] WO02/077021.
[1028] [90] Needleman & Wunsch (1970) J. Mol. Biol. 48, 443-453.
[1029] [91] Rice et al. (2000) Trends Genet 16:276-277.
[1030] [92] U.S. Pat. No. 6,355,271.
[1031] [93] WO00/23105.
[1032] [94] Vaccine Design . . . (1995) eds. Powell & Newman. ISBN: 030644867X. Plenum.
[1033] [95] WO90/14837.
[1034] [96] WO90/14837.
[1035] [97] Podda & Del Giudice (2003) Expert Rev Vaccines 2:197-203.
[1036] [98] Podda (2001) Vaccine 19: 2673-2680.
[1037] [99] Vaccine Design: The Subunit and Adjuvant Approach (eds. Powell & Newman) Plenum Press 1995 (ISBN 0-306-44867-X).
[1038] [100] Vaccine Adjuvants: Preparation Methods and Research Protocols (Volume 42 of Methods in Molecular Medicine series). ISBN: 1-59259-083-7. Ed. O'Hagan.
[1039] [101] WO2008/043774.
[1040] [102] Allison & Byars (1992) Res Immunol 143:519-25.
[1041] [103] Hariharan et al. (1995) Cancer Res 55:3486-9.
[1042] [104] US-2007/014805.
[1043] [105] US-2007/0191314.
[1044] [106] Suli et al. (2004) Vaccine 22(25-26):3464-9.
[1045] [107] WO95/11700.
[1046] [108] U.S. Pat. No. 6,080,725.
[1047] [109] WO2005/097181.
[1048] [110] WO2006/113373.
[1049] [111] Han et al. (2005) Impact of Vitamin Eon Immune Function and Infectious Diseases in the Aged at Nutrition, Immune functions and Health EuroConference, Paris, 9-10 Jun. 2005.
[1050] [112] U.S. Pat. No. 6,630,161.
[1051] [113] U.S. Pat. No. 5,057,540.
[1052] [114] WO96/33739.
[1053] [115] EP-A-0109942.
[1054] [116] WO96/11711.
[1055] [117] WO00/07621.
[1056] [118] Barr et al. (1998) Advanced Drug Delivery Reviews 32:247-271.
[1057] [119] Sjolanderet et al. (1998) Advanced Drug Delivery Reviews 32:321-338.
[1058] [120] Niikura et al. (2002) Virology 293:273-280.
[1059] [121] Lenz et al. (2001) J Immunol 166:5346-5355.
[1060] [122] Pinto et al. (2003) J Infect Dis 188:327-338.
[1061] [123] Gerber et al. (2001) J Virol 75:4752-4760.
[1062] [124] WO03/024480.
[1063] [125] WO03/024481.
[1064] [126] Gluck et al. (2002) Vaccine 20:B10-B16.
[1065] [127] EP-A-0689454.
[1066] [128] Johnson et al. (1999) Bioorg Med Chem Lett 9:2273-2278.
[1067] [129] Evans et al. (2003) Expert Rev Vaccines 2:219-229.
[1068] [130] Meraldi et al. (2003) Vaccine 21:2485-2491.
[1069] [131] Pajak et al. (2003) Vaccine 21:S36-842.
[1070] [132] Kandimalla et al. (2003) Nucleic Acids Research 31:2393-2400.
[1071] [133] WO02/26757.
[1072] [134] WO99/62923.
[1073] [135] Krieg (2003) Nature Medicine 9:831-835.
[1074] [136] McCluskie et al. (2002) FEMS Immunology and Medical Microbiology 32:179-185.
[1075] [137] WO98/40100.
[1076] [138] U.S. Pat. No. 6,207,646.
[1077] [139] U.S. Pat. No. 6,239,116.
[1078] [140] U.S. Pat. No. 6,429,199.
[1079] [141] Kandimalla et al. (2003) Biochemical Society Transactions 31 (part 3):654-658.
[1080] [142] Blackwell et al. (2003) J Immunol 170:4061-4068.
[1081] [143] Krieg (2002) Trends Immunol 23:64-65.
[1082] [144] WO01/95935.
[1083] [145] Kandimalla et al. (2003) BBRC 306:948-953.
[1084] [146] Bhagat et al. (2003) BBRC 300:853-861.
[1085] [147] WO03/035836.
[1086] [148] WO01/22972.
[1087] [149] Schellack et al. (2006) Vaccine 24:5461-72.
[1088] [150] Kamath et al. (2008) Eur J Immunol 38:1247-56.
[1089] [151] Riedl et al. (2008) Vaccine 26:3461-8.
[1090] [152] WO95/17211.
[1091] [153] WO98/42375.
[1092] [154] Beignon et al. (2002) Infect Immun 70:3012-3019.
[1093] [155] Pizza et al. (2001) Vaccine 19:2534-2541.
[1094] [156] Pizza et al. (2000) Int J Med Microbiol 290:455-461.
[1095] [157] Scharton-Kersten et al. (2000) Infect Immun 68:5306-5313.
[1096] [158] Ryan et al. (1999) Infect Immun 67:6270-6280.
[1097] [159] Partidos et al. (1999) Immunol Lett 67:209-216.
[1098] [160] Peppoloni et al. (2003) Expert Rev Vaccines 2:285-293.
[1099] [161] Pine et al. (2002) J Control Release 85:263-270.
[1100] [162] Tebbey et al. (2000) Vaccine 18:2723-34.
[1101] [163] Domenighini et al. (1995) Mol Microbiol 15:1165-1167.
[1102] [164] WO99/40936.
[1103] [165] WO99/44636.
[1104] [166] Singh et al] (2001) J Cont Release 70:267-276.
[1105] [167] WO99/27960.
[1106] [168] U.S. Pat. No. 6,090,406.
[1107] [169] U.S. Pat. No. 5,916,588.
[1108] [170] EP-A-0626169.
[1109] [171] WO99/52549.
[1110] [172] WO01/21207.
[1111] [173] WO01/21152.
[1112] [174] Andrianov et al. (1998) Biomaterials 19:109-115.
[1113] [175] Payne et al. (1998) Adv Drug Delivery Review 31:185-196.
[1114] [176] U.S. Pat. No. 4,680,338.
[1115] [177] U.S. Pat. No. 4,988,815.
[1116] [178] WO92/15582.
[1117] [179] Stanley (2002) Clin Exp Dermatol 27:571-577.
[1118] [180] Wu et al. (2004) Antiviral Res. 64(2):79-83.
[1119] [181] Vasilakos et al. (2000) Cell Immunol. 204(1):64-74.
[1120] [182] U.S. Pat. Nos. 4,689,338, 4,929,624, 5,238,944, 5,266,575, 5,268,376, 5,346,905, 5,352,784, 5,389,640, 5,395,937, 5,482,936, 5,494,916, 5,525,612, 6,083,505, 6,440,992, 6,627,640, 6,656,938, 6,660,735, 6,660,747, 6,664,260, 6,664,264, 6,664,265, 6,667,312, 6,670,372, 6,677,347, 6,677,348, 6,677,349, 6,683,088, 6,703,402, 6,743,920, 6,800,624, 6,809,203, 6,888,000 and 6,924,293.
[1121] [183] Jones (2003) Curr Opin Investig Drugs 4:214-218.
[1122] [184] WO03/011223.
[1123] [185] Johnson et al. (1999) Bioorg Med Chem Lett 9:2273-2278.
[1124] [186] Evans et al. (2003) Expert Rev Vaccines 2:219-229.
[1125] [187] WO2004/060308.
[1126] [188] WO2004/064759.
[1127] [189] U.S. Pat. No. 6,924,271.
[1128] [190] US2005/0070556.
[1129] [191] U.S. Pat. No. 5,658,731.
[1130] [192] U.S. Pat. No. 5,011,828.
[1131] [193] WO2004/87153.
[1132] [194] U.S. Pat. No. 6,605,617.
[1133] [195] WO02/18383.
[1134] [196] WO2004/018455.
[1135] [197] WO03/082272.
[1136] [198] Wong et al. (2003) J Clin Pharmacol 43(7):735-42.
[1137] [199] US2005/0215517.
[1138] [200] Dyakonova et al. (2004) Int Immunopharmacol 4(13):1615-23.
[1139] [201] FR-2859633.
[1140] [202] Signorelli & Hadden (2003) Int Immunopharmacol 3(8):1177-86.
[1141] [203] WO2004/064715.
[1142] [204] De Libero et al, Nature Reviews Immunology, 2005, 5: 485-496
[1143] [205] U.S. Pat. No. 5,936,076.
[1144] [206] Oki et al, J. Clin. Investig., 113: 1631-1640
[1145] [207] US2005/0192248
[1146] [208] Yang et al, Angew. Cheng. Int. Ed., 2004, 43: 3818-3822
[1147] [209] WO2005/102049
[1148] [210] Goff et al, J. Am. Chem., Soc., 2004, 126: 13602-13603
[1149] [211] WO03/105769
[1150] [212] Cooper (1995) Pharm Biotechnol 6:559-80.
[1151] [213] WO99/11241.
[1152] [214] WO94/00153.
[1153] [215] WO98/57659.
[1154] [216] European patent applications 0835318, 0735898 and 0761231.
[1155] [217] WO2006/110603.
[1156] [218] Zwijnenburg et al. (2001) J Infect Dis 183:1143-6.
[1157] [219] Donnelly et al. (1997) Annu Rev Immunol 15:617-648.
[1158] [220] Strugnell et al. (1997) Immunol Cell Biol 75(4):364-369.
[1159] [221] Cui (2005) Adv Genet 54:257-89.
[1160] [222] Robinson & Tones (1997) Seminars in Immunol 9:271-283.
[1161] [223] Brunham et al. (2000) J Infect Dis 181 Suppl 3:S538-43.
[1162] [224] Svanholm et al. (2000) Scand J Immunol 51(4):345-53.
[1163] [225] DNA Vaccination—Genetic Vaccination (1998) eds. Koprowski et al. (ISBN 3540633928).
[1164] [226] Gene Vaccination: Theory and Practice (1998) ed. Raz (ISBN 3540644288).
[1165] [227] Ferreira et al. (2006) J Med Microbiol. 55(Pt 4):375-8.
[1166] [228] Findeis et al., Trends Biotechnol. (1993) 11:202
[1167] [229] Chiou et al. (1994) Gene Therapeutics: Methods And Applications Of Direct Gene Transfer. ed. Wolff
[1168] [230] Wu et al., J. Biol. Chem. (1988) 263:621
[1169] [231] Wu et al., J. Biol. Chem. (1994) 269:542
[1170] [232] Zenke et al., Proc. Natl. Acad. Sci. (USA) (1990) 87:3655
[1171] [233] Wu et al., J. Biol. Chem. (1991) 266:338
[1172] [234] Jolly, Cancer Gene Therapy (1994) 1:51
[1173] [235] Kimura, Human Gene Therapy (1994) 5:845
[1174] [236] Connelly, Human Gene Therapy (1995) 1:185
[1175] [237] Kaplitt, Nature Genetics (1994) 6:148
[1176] [238] WO 90/07936.
[1177] [239] WO 94/03622.
[1178] [240] WO 93/25698.
[1179] [241] WO 93/25234.
[1180] [242] U.S. Pat. No. 5,219,740.
[1181] [243] WO 93/11230.
[1182] [244] WO 93/10218.
[1183] [245] U.S. Pat. No. 4,777,127.
[1184] [246] GB Patent No. 2,200,651.
[1185] [247] EP-A-0345242.
[1186] [248] WO 91/02805.
[1187] [249] WO 94/12649.
[1188] [250] WO 93/03769.
[1189] [251] WO 93/19191.
[1190] [252] WO 94/28938.
[1191] [253] WO 95/11984.
[1192] [254] WO 95/00655.
[1193] [255] Curiel, Hum. Gene Ther. (1992) 3:147
[1194] [256] Wu, J. Biol. Chem. (1989) 264:16985
[1195] [257] U.S. Pat. No. 5,814,482.
[1196] [258] WO 95/07994.
[1197] [259] WO 96/17072.
[1198] [260] WO 95/30763.
[1199] [261] WO 97/42338.
[1200] [262] WO 90/11092.
[1201] [263] U.S. Pat. No. 5,580,859
[1202] [264] U.S. Pat. No. 5,422,120
[1203] [265] WO 95/13796.
[1204] [266] WO 94/23697.
[1205] [267] WO 91/14445.
[1206] [268] EP-0524968.
[1207] [269] Philip, Mol. Cell Biol. (1994) 14:2411
[1208] [270] Woffendin, Proc. Natl. Acad. Sci. (1994) 91:11581
[1209] [271] U.S. Pat. No. 5,206,152.
[1210] [272] WO 92/11033.
[1211] [273] U.S. Pat. No. 5,149,655.
[1212] [274] Brandt et al. (2006) J Antimicrob Chemother. 58(6):1291-4. Epub 2006 Oct. 26
[1213] [275] Winter et al., (1991) Nature 349:293-99
[1214] [276] U.S. Pat. No. 4,816,567.
[1215] [277] Inbar et al., (1972) Proc. Natl. Acad. Sci. U.S.A. 69:2659-62.
[1216] [278] Ehrlich et al., (1980) Biochem 19:4091-96.
[1217] [279] Huston et al., (1988) Proc. Natl. Acad. Sci. U.S.A. 85:5897-83.
[1218] [280] Pack et al., (1992) Biochem 31, 1579-84.
[1219] [281] Cumber et al., (1992) J. Immunology 149B, 120-26.
[1220] [282] Riechmann et al., (1988) Nature 332, 323-27.
[1221] [283] Verhoeyan et al., (1988) Science 239, 1534-36.
[1222] [284] GB 2,276,169.
[1223] [285] Gennaro (2000) Remington: The Science and Practice of Pharmacy. 20th edition, ISBN: 0683306472.
[1224] [286] Methods In Enzymology (S. Colowick and N. Kaplan, eds., Academic Press, Inc.)
[1225] [287] Handbook of Experimental Immunology, Vols. I-IV (D. M. Weir and C. C. Blackwell, eds, 1986, Blackwell Scientific Publications)
[1226] [288] Sambrook et al. (2001) Molecular Cloning: A Laboratory Manual, 3rd edition (Cold Spring Harbor Laboratory Press).
[1227] [289] Handbook of Surface and Colloidal Chemistry (Birdi, K. S. ed., CRC Press, 1997)
[1228] [290] Ausubel et al. (eds) (2002) Short protocols in molecular biology, 5th edition (Current Protocols).
[1229] [291] Molecular Biology Techniques: An Intensive Laboratory Course, (Ream et al., eds., 1998, Academic Press)
[1230] [292] PCR (Introduction to Biotechniques Series), 2nd ed. (Newton & Graham eds., 1997, Springer Verlag)
[1231] [293] Geysen et al. (1984) PNAS USA 81:3998-4002.
[1232] [294] Carter (1994) Methods Mol Biol 36:207-23.
[1233] [295] Jameson, B A et al. 1988, CABIOS 4(1):181-186.
[1234] [296] Raddrizzani & Hammer (2000) Brief Bioinform 1(2):179-89.
[1235] [297] Bublil et al. (2007) Proteins 68(1):294-304.
[1236] [298] De Lalla et al. (1999) J. Immunol. 163:1725-29.
[1237] [299] Kwok et al. (2001) Trends Immunol 22:583-88.
[1238] [300] Brusic et al. (1998) Bioinformatics 14(2):121-30
[1239] [301] Meister et al. (1995) Vaccine 13(6):581-91.
[1240] [302] Roberts et al. (1996) AIDS Res Hum Retroviruses 12(7):593-610.
[1241] [303] Maksyutov & Zagrebelnaya (1993) Comput Appl Biosci 9(3):291-7.
[1242] [304] Feller & de la Cruz (1991) Nature 349(6311):720-1.
[1243] [305] Hopp (1993) Peptide Research 6:183-190.
[1244] [306] Welling et al. (1985) FEBS Lett. 188:215-218.
[1245] [307] Davenport et al. (1995) Immunogenetics 42:392-297.
[1246] [308] Tsurui & Takahashi (2007) J Pharmacol Sci. 105(4):299-316.
[1247] [309] Tong et cal. (2007) Brief Bioinform. 8(2):96-108.
[1248] [310] Schirle et al. (2001) J Immunol Methods. 257(1-2):1-16.
[1249] [311] Chen et al. (2007) Amino Acids 33(3):423-8.
[1250] [312] Current Protocols in Molecular Biology (F. M. Ausubel et al., eds., 1987) Supplement 30
[1251] [313] Smith & Waterman (1981) Adv. Appl. Math. 2: 482-489.
[1252] [314] King et al. (2006) Mol Microbiol 59(3):961-74.
[1253] [315] Zysk et al. (2000) Infect Immun 68:3740-3.
[1254] [316] Wellmer et al. (2002) Infect Immun 70:6504-8.
[1255] [317] Gosink et al. (2000) Infect Immun 68(10):5690-5.
[1256] [318] Wizemann et al. (2001) Infect Immun 69:1593-8.
[1257] [319] Moscoso et al. (2005) Appl Environ Microbiol 71:8706-13.
[1258] [320] Kharat & Tomasz (2003) Infect Immun 71:2758-65.
[1259] [321] Chen et al. (2005) FEMS Microbiol Lett. 253(1):151-4.
[1260] [322] Bumbaca et al. (2007) Proteins. 66(3):547-58.
[1261] [323] Monterroso et al. (2005) Biochem J. 391:41-9.
[1262] [324] Moscoso et al. (2005) J Bacteriology 187:6238-41.
[1263] [325] Ogunniyi et al. (2001) Infect Immun 69:5997-6003.
[1264] [326] Ng et al. (2005) J Bacteriol. 187(20:7444-59.
[1265] [327] Mills et al. (2007) J Bacteriol. 189:4544-6.
[1266] [328] WO2008/079732.

1. An immunogenic composition comprising a combination of S. pneumoniae antigens, said combination comprising two or more antigens selected from the group consisting of: (1) a spr0057 antigen; (2) a spr0096 antigen; (3) a spr0565 antigen; (4) a spr2021 antigen; (5) a spr1345 antigen; (6) a spr1416 antigen; (7) a spr1418 antigen; (8) a spr0867 antigen; (9) a spr1431 antigen; (10) a spr1739 antigen; (11) a spr1098 antigen; (12) a spr0286 antigen; (13) a spr1433 antigen; and/or (14) a spr1707 antigen.

2. An immunogenic composition comprising a combination of S. pneumoniae antigens, said combination comprising two, three or four antigens selected from the group consisting of: (1) a spr0057 antigen; (2) a spr0096 antigen; (3) a spr0565 antigen; (4) a spr2021 antigen, wherein:
said spr0057 antigen is a polypeptide that comprises an amino acid sequence: (a) having 80% or more identity to SEQ ID NO: 1; and/or (b) comprising a fragment of at least 10 consecutive amino acids, comprising an epitope, of SEQ ID NO: 1;
said spr0096 antigen is a polypeptide that comprises an amino acid sequence: (a) having 80% or more identity to SEQ ID NO: 12; and/or (b) comprising a fragment of at least 10 consecutive amino acids, comprising an epitope, of SEQ ID NO: 12;
said spr0565 antigen is a polypeptide that comprises an amino acid sequence: (a) having 80% or more identity to SEQ ID NO: 3; and/or (b) comprising a fragment of at least 10 consecutive amino acids, comprising an epitope, of SEQ ID NO: 3; and
said spr2021 antigen is a polypeptide that comprises an amino acid sequence: (a) having 80% or more identity to SEQ ID NO: 11; and/or (b) comprising a fragment of at least 10 consecutive amino acids, comprising an epitope, of SEQ ID NO: 11.

3. The composition of claim 2, further comprising a S. pneumoniae RrgA and/or RrgB pilus antigen.

4. The composition of claim 2, further comprising a S. pneumoniae Pmp antigen.

5. The composition of claim 2, further comprising one or more conjugates of a pneumococcal capsular saccharide and a carrier protein, wherein (i) the capsular saccharide is from one or more of the following pneumococcal serotypes: 1, 3, 4, 5, 6B, 7F, 9V, 14, 18C, 19F and 23F; and (ii) the carrier protein is a bacterial toxin or toxoid, or is protein D from H. influenzae.

6. An immunogenic composition comprising a combination of: (a) one or more antigen(s) selected from the group consisting of: (1) a spr0057 antigen; (2) a spr0096 antigen; (3) a spr0565 antigen; (4) a spr2021 antigen; (5) a spr1345 antigen; (6) a spr1416 antigen; (7) a spr1418 antigen; (8) a spr0867 antigen; (9) a spr1431 antigen; (10) a spr1739 antigen; (11) a spr1098 antigen; (12) a spr0286 antigen; (13) a spr1433 antigen; and/or (14) a spr1707 antigen; and (b) one or more conjugates of a pneumococcal capsular saccharide and a carrier protein.

7. An immunogenic composition comprising a combination of: (a) one or more antigen(s) selected from the group consisting of: (1) a spr0057 antigen; (2) a spr0096 antigen; (3) a spr0565 antigen; (4) a spr2021 antigen; (5) a spr1345 antigen; (6) a spr1416 antigen; (7) a spr1418 antigen; (8) a spr0867 antigen; (9) a spr1431 antigen; (10) a spr1739 antigen; (11) a spr1098 antigen; (12) a spr0286 antigen; (13) a spr1433 antigen; and/or (14) a spr1707 antigen; and (b) one or more antigen(s) selected from the group consisting of: diphtheria toxoid; tetanus toxoid; hepatitis B virus surface antigen; an inactivated poliovirus antigen; one or more acellular pertussis antigens; a conjugate of the capsular saccharide antigen from H. influenzae type B; a conjugate of the capsular saccharide antigen from serogroup C of N. meningitidis; a conjugate of the capsular saccharide antigen from serogroup Y of N. meningitidis; a conjugate of the capsular saccharide antigen from serogroup W135 of N. meningitidis; and a conjugate of the capsular saccharide antigen from serogroup A of N. meningitidis.

8. An immunogenic composition comprising a combination of S. pneumoniae antigens, said combination comprising two or more antigens selected from the group consisting of: (1) a spr0057 antigen; (2) a spr0565 antigen; (3) a spr0286 antigen; (4) a spr1098 antigen; (5) a spr1345 antigen; (6) a spr1416 antigen; and/or (7) a spr1418 antigen.

9. An immunogenic composition comprising a combination of S. pneumoniae antigens, said combination comprising two or more antigens selected from the group consisting of: (1) a spr2021 antigen; (2) a spr1431 antigen; (3) a spr1739 antigen; and/or (4) a spr0867 antigen.

10. An immunogenic composition comprising a combination of S. pneumoniae antigens, said combination comprising two or more antigens selected from the group consisting of: (1) a spr0057 antigen; (2) a spr0565 antigen; (3) a spr2021 antigen; (4) a spr1098 antigen; (5) a spr1345 antigen; (6) a spr1416 antigen; (7) a spr1418 antigen; (8) a spr0867 antigen; (9) a spr1431 antigen; (10) a spr1739 antigen; and/or (11) a spr0286 antigen.

11. An immunogenic composition comprising a combination of S. pneumoniae antigens, said combination comprising two or more antigens selected from the group consisting of: (1) a spr0096 antigen; (2) a spr1433 antigen; and/or (3) a spr1707 antigen.

12. An immunogenic composition comprising a combination of S. pneumoniae antigens, said combination comprising two or more antigens selected from the group consisting of: (1) a spr0057 antigen; (2) a spr0096 antigen; (3) a spr0565 antigen; (4) a spr1098 antigen; (5) a spr1345 antigen; (6) a spr1416 antigen; (7) a spr1418 antigen; (8) a spr0286 antigen; (9) a spr1433 antigen; and/or (10) a spr1707 antigen.

13. An immunogenic composition comprising a combination of S. pneumoniae antigens, said combination comprising two or more antigens selected from the group consisting of: (1) a spr2021 antigen; (2) a spr0096 antigen; (3) a spr1739 antigen; (4) a spr0867 antigen; (5) a spr1431 antigen; (6) a spr1433 antigen; and/or (7) a spr1707 antigen.

14. An immunogenic composition comprising a combination of: (a) one or more antigen(s) selected from the group consisting of: (1) a spr0057 antigen; (2) a spr0096 antigen; (3) a spr0565 antigen; (4) a spr2021 antigen; (5) a spr1345 antigen; (6) a spr1416 antigen; (7) a spr1418 antigen; (8) a spr0867 antigen; (9) a spr1431 antigen; (10) a spr1739 antigen; (11) a spr1098 antigen; (12) a spr0286 antigen; (13) a spr1433 antigen; and/or (14) a spr1707 antigen; and (b) a temperature protective agent.

15. An immunogenic composition comprising two or more different pneumococcal exoglycosidases.

16. An immunogenic composition comprising at least one pneumococcal exoglycosidase and at least one pneumococcal peptidoglycan hydrolase.

17. An immunogenic composition comprising two or more different pneumococcal peptidoglycan hydrolases.

18. (canceled)

19. A polypeptide of formula NH₂-A-{-X-L-}ₙ-B—COOH, wherein:
X is an amino acid sequence of a pneumococcal antigen, selected from the group consisting of: (1) a spr0057 antigen; (2) a spr0096 antigen; (3) a spr0565 antigen; (4) a spr2021 antigen; (5) a RrgA antigen; and (6) a RrgB antigen;
L is an optional linker amino acid sequence;
A is an optional N-terminal amino acid sequence;
B is an optional C-terminal amino acid sequence; and
n is an integer of 2 or more.

20. The polypeptide of claim 19, wherein X is an amino acid sequence of a pneumococcal antigen, selected from the group consisting of: (1) a spr0057 antigen; (2) a spr0096 antigen; (3) a spr0565 antigen; (4) a spr2021 antigen; and (5) a RrgA antigen.

21. The polypeptide of claim 19, wherein X is an amino acid sequence of a pneumococcal antigen, selected from the group consisting of: (1) a spr0057 antigen; (2) a spr0096 antigen; (3) a spr0565 antigen; and (4) a spr2021 antigen.

22. The polypeptide of claim 19, wherein n is 2.

23. The polypeptide of claim 19, wherein at least one L sequence comprises Glyₓ, where x=2, 3, 4, 5, 6, 7, 8, 9 or 10.

24. The polypeptide of claim 19, comprising an amino acid sequence selected from the group consisting of SEQ ID NOs: 193 to 228.

25. A polypeptide having 75% or more sequence identity to an amino acid sequence selected from the group consisting of SEQ ID NOs: 193 to 228.

26. Nucleic acid encoding the polypeptide of 19.

27. A pneumococcus in which one or more of the following polypeptides has/have been knocked out: (1) spr0057; (2) spr0286; (3) spr0565; (4) spr1098; (5) spr1345; (6) spr1416; (7) spr1418; (8) spr0867; (9) spr1431; (10) spr1739; (11) spr2021; (12) spr0096; (13) spr1433; and/or (14) spr1707.

28. A method for raising an immune response in a mammal comprising the step of administering to the mammal an effective amount of the composition of any one of claim 1 to 17.

29. (canceled)

30. (canceled)

31. (canceled)

32. The composition of claim 3, further comprising a S. pneumoniae Pmp antigen.

33. The composition of claim 3, further comprising one or more conjugates of a pneumococcal capsular saccharide and a carrier protein, wherein (i) the capsular saccharide is from one or more of the following pneumococcal serotypes: 1, 3, 4, 5, 6B, 7F, 9V, 14, 18C, 19F and 23F; and (ii) the carrier protein is a bacterial toxin or toxoid, or is protein D from H. influenzae.

34. The composition of claim 4, further comprising one or more conjugates of a pneumococcal capsular saccharide and a carrier protein, wherein (i) the capsular saccharide is from one or more of the following pneumococcal serotypes: 1, 3, 4, 5, 6B, 7F, 9V, 14, 18C, 19F and 23F; and (ii) the carrier protein is a bacterial toxin or toxoid, or is protein D from H. influenzae.

The application's sequence listing, which the Patent Office published only in electronic form, follows.

SEQUENCE LISTING (235 sequences)

SEQ ID NO: 1 - protein, 1312 aa, Streptococcus pneumoniae
MKHEKQQRFSIRKYAVGAASVLIGFAFQAQTVAADGVTPTTTENQPTIHTVSDSPQSSENRTEETPKAELQPEAPKTVETETPATDKVASLPKTEEKPQEEVSSTPSDKAEVVTPTSAEKETANKKEEEASPKKEEAKEVDSKESNTDKTDKDKPAKKDEAKAEADKPETETGKERAATVNEKLAKKKIVSIDAGRKYFSPEQLKEIIDKAKHYGYTDLHLLVGNDGLRFMLDDMSITANGKTYASDDVKRAIEKGTNDYYNDPNGNHLTESQMTDLINYAKDKGIGLIPTVNSPGHMDAILNAMKELGIQNPNFSYFGKKSARTVDLDNEQAVAFTKALIDKYAAYFAKKTEIFNIGLDEYANDATDAKGWSVLQADKYYPNEGYPVKGYEKFIAYANDLARIVKSHGLKPMAFNDGIYYNSDTSFGSFDKDIIVSMWTGGWGGYDVASSKLLAEKGHQILNTNDAWCYVLGRNADGQGWYNLDQGLNGIKNTPITSVPKTEGADIPIIGGMVAAWADTPSARYSPSHLFKLMRHFANANAEYFAADYESAEQALNEVPKDLNRYTAESVAAVKEAEKAIRSLDSNLSRAQQDTIDQAIAKLQETVNNLTLTPEAQKEEEAKREVEKLAKNKVISIDAGRKYFTLDQLKRIVDKASELGYSDVHLLLGNDGLRFLLNDMTITANGKTYASDDVKKAIIEGTKAYYDDPNGTALTQAEVTELIEYAKSKDIGLIPAINSPGHMDAMLVAMEKLGIKNPQAHFDKVSKTTMDLKNEEAMNFVKALIGKYMDFFAGKTKIFNFGTDEYANDATSAQGWYYLKWYQLYGKFAEYANTLAAMAKERGLQPMAFNDGFYYEDKDDVQFDKDVLISYWSKGWWGYNLASPQYLASKGYKFLNTNGDWYYVIGNHKQDEAYPLSKAVENSGKVPFNQLASTKYPEVDLPTVGSMLSIWADRPSAEYKEEEIFELMTAFADHNKDYFRANYNALREELAKIPTNLEGYSKESLEALDAAKTALNYNLNRNKQAELDTLVANLKAALQGLKPAATHSGSLDENEVAANVETRPELITRTEEIPFEVIKKENPNLPAGQENIITAGVKGERTHYISVLTENGKTTETVLDSQVTKEVINQVVEVGSPVTHKGDESGLAPTTEVKPRLDIQEEEIPFTTVTRENPLLLKGKTQVITKGVNGHRSNFYSVSTSADGKEVKTLVNSVVAQEAVTQIVEVGTMVTHVGDENGQAAIAEEKPKLEIPSQPAPSTAPAEESKALPQDPAPVVTEKKLPETGTHDSAELVVAGLMSTLAAYGLTKRKED

SEQ ID NO: 2 - protein, 1078 aa, Streptococcus pneumoniae
MILQYVYWSVYMQTKTKKLIVSLSSLVLSGFLLNHYMTVGAEETTTNTIQQSQKEVQYQQRDTKNLVENGDFGQTEDGSSPWTGSKAQGWSAWVDQKNSSADASTRVIEAKDGAITISSPEKLRAAVHRMVPIEAKKKYKLRFKIKTDNKVGIAKVRIIEESGKDKRLWNSATTSGTKDWQTIEADYSPTLDVDKIKLELFYETGTGTVSFKDIELVEVADQPSEDSQTDKQLEEKIDLPIGKKHVFSLADYTYKVENPDVASVKNGILEPLKEGTTNVIVSKDGKEVKKIPLKILASVKDTYTDRLDDWNGIIAGNQYYDSKNEQMAKLNQELEGKVADSLSSISSQADRIYLWEKFSNYKTSANLTATYRKLEEMAKQVTNPSSRYYQDETVVRTVRDSMEWMHKHVYNSEKSIVGNWWDYEIGTPRAINNTLSLMKEYFSDEEIKKYTDVIEKFVPDPEHFRKTTDNPFKALGGNLVDMGRVKVIAGLLRKDDQEISSTIRSIEQVFKLVDQGEGFYQDGSYIDHTNVAYTGAYGNVLIDGLSQLLPVIQKTKNPIDKDKMQTMYHWIDKSFAPLLVNGELMDMSRGRSISRANSEGHVAAVEVLRGIHRIADMSEGETKQRLQSLVKTIVQSDSYYDVFKNLKTYKDISLMQSLLSDAGVASVPRTSYLSAFNKMDKTAMYNAEKGFGFGLSLFSSRTLNYEHMNKENKRGWYTSDGMFYLYNGDLSHYSDGYWPTVNPYKMPGTTETDAKRADSDTGKVLPSAFVGTSKLDDANATATMDFTNWNQTLTAHKSWFMLKDKIAFLGSNIQNTSTDTAATTIDQRKLESSNPYKVYVNDKEASLTEQEKDYPETQSVFLESSDSKKNIGYFFFKKSSISMSKALQKGAWKDINEGQSDKEVENEFLTISQAHKQNGDSYGYMLIPNVDRATFNQMIKELESSLIENNETLQSVYDAKQGVWGIVKYDDSVSTISNQFQVLKRGVYTIRKEGDEYKIAYYNPETQESAPDQEVFKKLEQAAQPQVQNSKEKEKSEEEKNHSDQKNLPQTGEGQSILASLGFLLLGAFYLFRRGKNN

SEQ ID NO: 3 - protein, 2228 aa, Streptococcus pneumoniae
MGKGHWNRKRVYSIRKFAVGACSVMIGTCAVLLGGNIAGESVVYADETLITHTAEKPKEEKMIVEEKADKALETKNVVERTEQSEPSSTEAIASEKKEDEAVTPKEEKVSAKPEEKAPRIESQASSQEKPLKEDAKAVTNEEVNQMIENRKVDFNQNWYFKLNANSKEAIKPDADVSTWKKLDLPYDWSIFNDFDHESPAQNEGGQLNGGEAWYRKTFKLDEKDLKKNVRLTFDGVYMDSQVYVNGQLVGHYPNGYNQFSYDITKYLYKDGRENVIAVHAVNKQPSSRWYSGSGIYRDVTLQVTDKVHVEKNGTTILTPKLEEQQHGKVETHVTSKIVNTDDKDHELVAEYQIVERGGHAVTGLVRTASRTLKAHESTSLDAILEVERPKLWTVLNDKPALYELITRVYRDGQLVDAKKDLFGYRYYHWTPNEGFSLNGERIKFHGVSLHHDHGALGAEENYKAEYRRLKQMKEMGVNSIRTTHNPASEQTLQIAAELGLLVQEEAFDTWYGGKKPYDYGRFFEKDATHPEARKGEKWSDFDLRTMVERGKNNPAIFMWSIGNEIGEANGDAHSLATVKRLVKVIKDVDKTRYVTMGADKFRFGNGSGGHEKIADELDAVGFNYSEDNYKALRAKHPKWLIYGSETSSATRTRGSYYRPERELKHSNGPERNYEQSDYGNDRVGWGKTATASWTFDRDNAGYAGQFIWTGTDYIGEPTPWHNQNQTPVKSSYFGIVDTAGIPKHDFYLYQSQWVSVKKKPMVHLLPHWNWENKELASKVADSEGKIPVRAYSNASSVELFLNGKSLGLKTFNKKQTSDGRTYQEGANANELYLEWKVAYQPGTLEAIARDESGKEIARDKITTAGKPAAVRLIKEDHAIAADGKDLTYIYYEIVDSQGNVVPTANNLVRFQLHGQGQLVGVDNGEQASRERYKAQADGSWIRKAFNGKGVAIVKSTEQAGKFTLTAHSDLLKSNQVTVFTGKKEGQEKTVLGTEVPKVQTIIGEAPEMPTTVPFVYSDGSRAERPVTWSLVDVSKPGIVTVKGMADGREVEARVEVIALKSELPVVKRIAPNTNLNSVDKSVSYVLTDGSVQEYEVDKWEIAEEDKAKLAIPGSRIQATGYLEGQPIHATLVVEEGNPAAPVVPTVTVGGEAVTGLTSRQPMQYRTLSYGAQLPEVTASAENADVTVLQASAANGMRASIFIQPKDGGPLQTYAIQFLEEAPKIAHLSLQVEKADSLKEDQTVKLSVRAHYQDGTQAVLPADKVTFSTSGEGEVAIRKGMLELHKPGAVTLNAEYEGAKGQVELTIQANTEKKIAQSIRPVNVVTDLHQEPSLPATVTVEYDKGFPKTHKVTWQAIPKEKLDSYQIFEVLGKVEGIDLEARAKVSVEGIVSVEEVSVTTPIAEAPQLPESVRTYDSNGHVSSAKVAWDAIRPEQYAKEGVFTVNGRLEGTQLTTKLHVRVSAQTEQGANISDQWTGSELPLAFASDSNPSDPVSNVNDKLISYNNQPANRWTNWNRSNPEASVGVLFGDSGILSKRSVDNLSVGFHEDHGVGAPKSYVIEYYVGKTVPTAPKNPSFVGNEDHVFNDSANWKPVTNLKAPAQLKAGEMNHFSFDKVETYAIRIRMVKADNKRGTSITEVQIFAKQVAAAKQGQTRIQVDGKDLANFNPDLTDYYLESVDGKVPAVTANVSNNGLATVVPSVREGEPVRVIAKAENGDILGEYRLHFTKDKNLLSHKPVAAVKQARLLQVGQALELPTKVPVYFTGKDGYETKDLTVEWEEVPAENLTKAGQFTVRGRVLGSNLVAEVTVRVTDKLGETLSDNPNYDENSNQAFASATNDIDKNSHDRVDYLNDGDHSENRRWTNWSPTPSSNPEVSAGVIFRENGKIVERTVAQAKLHFFADSGTDAPSKLVLERYVGPGFEVPTYYSNYQAYESGHPFNNPENWEAVPYRADKDIAAGDEINVTFKAVKAKVMRWRMERKADKSGVAMIEMTFLAPSELPQESTQSKILVDGKELADFAENRQDYQITYKGQRPKVSVEENNQVASTVVDSGEDSLPVLVRLVSESGKQVKEYRIQLTKEKPVSAVQEDLPKLEFVEKDLAYKTVEKKDSTLYLGETRVEQEGKVGKERIFTVINPDGSKEEKLREVVEVPTDRIVLVGTKPVAQEAKKPQVSEKADTKPIDSSEADQTNKAQLPNTGSAASQAAVAAGLALLGLSAGLVVTKGKKED

SEQ ID NO: 4 - protein, 247 aa, Streptococcus pneumoniae
MSQKNNKKKNKRKNLLTNILAGFLILLSLALIFNTQIRNIFIVWNTNKYQVSQVSKEKLEENQDTEGNFDFDSVKAISSEAVLTSQWDAQKLPVIGGIAIPELEMNLPIFKGLDNVNLFYGAGTMKREQVMGEGNYSLASHHIFGVDNANKMLFSPLDNAKNGMKIYLTDKNKVYTYEIREVKRVTPDRVDEVDDRDGVNEITLVTCEDLAATERIIVKGDLKETKDYSQTSDEILTAFNQPYKQFY

SEQ ID NO: 5 - protein, 202 aa, Streptococcus pneumoniae
MVPKTATSTETKTITRIIHYVDKVTNQNVKEDVVQPVTLSRTKTENKVTGVVTYGEWTTGNWDEVISGKIDKYKDPDIPTVESQEVTSDSSDKEITVRYDRLSTPEKPIPQPNPEHPSVPTPNPELPNQETPTPDKPTPEPGTPKTETPVNPDPEVPTYETGKREELPNTGTEANATLASAGIMTLLAGLGLGFFKKKEDEK

SEQ ID NO: 6 - protein, 128 aa, Streptococcus pneumoniae
MEKDMNLKREQEFVSQYHFDARNFEWENENGAPETKVDVNFQLLQHDQENQVTSLIVILSFMIVFDKFVISGTISQVNHIDGRIVNEPNELNQEEVETLARPCLNMLNRLTYEVTEIALDLPGINLEF

SEQ ID NO: 7 - protein, 259 aa, Streptococcus pneumoniae
MKKNSLYIISSLFFACVLFVYATATNFQNSTSARQVKTETYTNTVTNVPIDIRYNSDKYFISGFASEVSVVLTGANRLSLASEMQESTRKFKVTADLTDAGVGTIEVPLSIEDLPNGLTAVATPQKITVKIGKKAQKDKVKIVPEIDPSQIDSRVQIENVMVSDKEVSITSDQETLDRIDKIIAVLPTSERITGNYSGSVPLQAIDRNGVVLPAVITPFDTIMKVTTKPVAPSSSTSNSSTSSSSETSSSTKATSSKTN

SEQ ID NO: 8 - protein, 721 aa, Streptococcus pneumoniae
MNLGEFWYNKINKNRGRRLMKKVRFIFLALLFFLASPEGAMASDGTWQGKQYLKEDGSQAANEWVFDTHYQSWFYIKADANYAENEWLKQGDDYFYLKSGGYMAKSEWVEDKGAFYYLDQDGKMKRNAWVGTSYVGATGAKVIEDWVYDSQYDAWFYIKADGQHAEKEWLQIKGKDYYFKSGGYLLTSQWINQAYVNASGAKVQQGWLFDKQYQSWFYIKENGNYADKEWIFENGHYYYLKSGGYMAANEWIWDKESWFYLKFDGKIAEKEWVYDSHSQAWYYFKSGGYMAANEWIWDKESWFYLKFDGKMAEKEWVYDSHSQAWYYFKSGGYMTANEWIWDKESWFYLKSDGKIAEKEWVYDSHSQAWYYFKSGGYMTANEWIWDKESWFYLKSDGKMAEKEWVYDSHSQAWYYFKSGGYMAKNETVDGYQLGSDGKWLGGKATNKNAAYYQVVPVTANVYDSDGEKLSYISQGSVVWLDKDRKSDDKRLAITISGLSGYMKTEDLQALDASKDFIPYYESDGHRFYHYVAQNASIPVASHLSDMEVGKKYYSADGLHFDGFKLENPFLFKDLTEATNYSAEELDKVFSLLNINNSLLENKGATFKEAEEHYHINALYLLAHSALESNWGRSKIAKDKNNFFGITAYDTTPYLSAKTFDDVDKGILGATKWIKENYIDRGRTFLGNKASGMNVEYASDPYWGEKIASVMMKINEKLGGKD

SEQ ID NO: 9 - protein, 501 aa, Streptococcus pneumoniae
MSVTFFIGEERLKIKIGLASICLLGLATSHVAANETEVAKTSQDTTTASSSSEQNQSSNKTQTSAEVQTNAAAYWDGDYYVKDDGSKAQSEWIFDNYYKAWFYINSDGRYSQNEWHGNYYLKSGGYMAQNEWIYDSNYKSWFYLKSDGAYAHQEWQLIGNKWYYFKKWGYMAKSQWQGSYFLNGQGAMIQNEWLYDPAYSAYFYLKSDGTYANQEWQKVGGKWYYFKKWGYMARNEWQGNYYLTGSGAMATDEVIMDGARYIFAASGELKEKKDLNVGWVHRDGKRYFFNNREEQVGTEHAKKIIDISEHNGRINDWKKVIDENKVDGVIVRLGYSGKEDKELAHNIKELNRLGIPYGVYLYTYAENETDAENDAKQTIELIKKYNMNLSYPIYYDVENWEYVNKSKRAPSDTDTWVKIINKYMDTMKQAGYQNVYVYSYRSLLQTRLKHPDILKHVNWVAAYTNALEWENPYYSGEKGWQYTSSEYMKGIQGRVDVSVWY

SEQ ID NO: 10 - protein, 471 aa, Streptococcus pneumoniae
MANKAVNDFILAMNYDKKKLLTHQGESIENRFIKEGNQLPDEFVVIERKKRSLSTNTSDISVTATNDSRLYPGALLVVDETLLENNPTLLAVDRAPMTYSIDLPGLASSDSFLQVEDPSNSSVRGAVNDLLAKWHQDYGQVNNVPARMQYEKITAHSMEQLKVKFGSDFEKTGNSLDIDFNSVHSGEKQIQIVNFKQIYYTVSVDAVKNPGDVFQDTVTVEDLKQRGISAERPLVYISSVAYGRQVYLKLETTSKSDEVEAAFEALIKGVKVAPQTEWKQILDNTEVKAVILGGDPSSGARVVTGKVDMVEDLIQEGSRFTADHPGLPISYTTSFLRDNVVATFQNSTDYVETKVTAYRNGDLLLDHSGAYVAQYYITWDELSYDHQGKEVLTPKAWDRNGQDLTAHFTTSIPLKGNVRNLSVKIRECTGLAWEWWRTVYEKTDLPLVRKRTISIWGTTLYPQVEDKVEND

SEQ ID NO: 11 - protein, 392 aa, Streptococcus pneumoniae
MKKKILASLLLSTVMVSQVAVLTTAHAETTDDKIAAQDNKISNLTAQQQEAQKQVDQIQEQVSAIQAEQSNLQAENDRLQAESKKLEGEITELSKNIVSRNQSLEKQARSAQTNGAVTSYINTIVNSKSITEAISRVAAMSEIVSANNKMLEQQKADKKAISEKQVANNDAINTVIANQQKLADDAQALTTKQAELKAAELSLAAEKATAEGEKASLLEQKAAAEAEARAAAVAEAAYKEKRASQQQSVLASANTNLTAQVQAVSESAAAPVRAKVRPTYSTNASSYPIGECTWGVKTLAPWAGDYWGNGAQWATSAAAAGFRTGSTPQVGAIACWNDGGYGHVAVVTAVESTTRIQVSESNYAGNRTIGNHRGWFNPTTTSEGFVTYIYAD

SEQ ID NO: 12 - protein, 167 aa, Streptococcus pneumoniae
MKSITKKIKATLAGVAALFAVFAPSFVSAQESSTYTVKEGDTLSEIAETHNTTVEKLAENNHIDNIHLIYVDQELVIDGPVAPVATPAPATYAAPAAQDETVSAPVAETPVVSETVVSTVSGSEAEAKEWIAQKESGGSYTATNGRYIGRYGSWTAAKNFWLNNGWY

SEQ ID NO: 13 - protein, 225 aa, Streptococcus pneumoniae
MTYLDAFKSGTLVLPSALLLHFKELFPSSDDFLVWQFFYLQNTTGLEEMSPSQIAERIGKEISDVNQSISNLTERGLLQYRTIELNGEIELLFDASLALERLDDLFGAVHSSSDQLTSQNQLKDLVETFQQELGRLLTPFEIEDLTKTLKEDGTSADLIKEALREAVLNGKPNWKYIQAILRNWRHEGIKSVAQIEAKRAEREASNPQLTQVSADFRNAMDLWKD

SEQ ID NO: 14 - protein, 659 aa, Streptococcus pneumoniae
MKKNRVFATAGLVLLAAGVLAACSSSKSSDSSAPKAYGYVYTADPETLDYLISRKNSTTVVTSNGIDGLFTNDNYGNLAPAVAEDWEVSKDGLTYTYKIRKGVKWFTSDGEEYAEVTAKDFVNGLKHAADKKSEAMYLAENSVKGLADYLSGTSTDFSTVGVKAVDDYTLQYTLNQPEPFWNSKLTYSIFWPLNEEFETSKGSDFAKPTDPTSLLYNGPFLLKGLTAKSSVEFVKNEQYWDKENVHLDTINLAYYDGSDQESLERNFTSGAYSYARLYPTSSNYSKVAEEYKDNIYYTQSGSGIAGLGVNIDRQSYNYTSKTTDSEKVATKKALLNKDFRQALNFALDRSAYSAQINGKDGAALAVRNLFVKPDFVSAGEKTFGDLVAAQLPAYGDEWKGVNLADGQDGLFNADKAKAEFAKAKKALEADGVQFPIHLDVPVDQASKNYISRIQSFKQSVETVLGVENVVVDIQQMTSDEFLNITYYAANASSEDWDVSGGVSWGPDYQDPSTYLDILKTTSSETTKTYLGFDNPNSPSVVQVGLKEYDKLVDEAAKETSDLNVRYEKYAAAQAWLTDSSLFIPAMASSGAAPVLSRIVPFTGASAQTGSKGSDVYFKYLKLQDKAVTKEEYEKAREKWLKEKAESNEKAQKELASHVK

SEQ ID NO: 15 - protein, 701 aa, Streptococcus pneumoniae
MFASKSERKVHYSIRKFSIGVASVAVASLVMGSVVHATENEGSTQAATSSNMAKTEHRKAAKQVVDEYIEKMLREIQLDRRKHTQNVALNIKLSAIKTKYLRELNVLEEKSKDELPSEIKAKLDAAFEKFKKDTLKPGEKVAEAKKKVEEAKKKAEDQKEEDRRNYPTNTYKTLELEIAEFDVKVKEAELELVKEEAKESRNEGTIKQAKEKVESKKAEATRLENIKTDRKKAEEEAKRKADAKLKEANVATSDQGKPKGRAKRGVPGELATPDKKENDAKSSDSSVGEETLPSSSLKSGKKVAEAEKKVEEAEKKAKDQKEEDRRNYPTNTYKTLDLEIAESDVKVKEAELELVKEEAKEPRDEEKIKQAKAKVESKKAEATRLENIKTDRKKAEEEAKRKAAEEDKVKEKPAEQPQPAPATQPEKPAPKPEKPAEQPKAEKTDDQQAEEDYARRSEEEYNRLTQQQPPKTEKPAQPSTPKTGWKQENGMWYFYNTDGSMATGWLQNNGSWYYLNANGAMATGWLQNNGSWYYLNANGSMATGWLQNNGSWYYLNANGAMATGWLQYNGSWYYLNSNGAMATGWLQYNGSWYYLNANGDMATGWLQNNGSWYYLNANGDMATGWLQYNGSWYYLNANGDMATGWVKDGDTWYYLEASGAMKASQWFKVSDKWYYVNGSGALAVNTTVDGYGVNANGEWVN

SEQ ID NO: 16 - protein, 196 aa, Streptococcus pneumoniae
MIPVVIEQTSRGERSYDIYSRLLKDRIIMLTGPVEDNMANSVIAQLLFLDAQDSTKDIYLYVNTPGGSVSAGLAIVDTMNFIKADVQTIVMGMAASMGTVIASSGAKGKRFMLPNAEYMIHQPMGGTGGGTQQTDMAIAAEHLLKTRNTLEKILAENSGQSMEKVHADAERDNWMSAQETLEYGFIDEIMANNSLN

SEQ ID NO: 17 - protein, 318 aa, Streptococcus pneumoniae
MEINVSKLRTDLPQVGVQPYRQVHAHSTGNPHSTVQNEADYHWRKDPELGFFSHIVGNGCIMQVGPVDNGAWDVGGGWNAETYAAVELIESHSTKEEFMTDYRLYIELLRNLADEAGLPKTLDTGSLAGIKTHEYCTNNQPNNHSDHVDPYPYLAKWGISREQFKHDIENGLTIETGWQKNDTGYWYVHSDGSYPKDKFEKINGTWYYFDSSGYMLADRWRKHTDGNWYWFDNSGEMATGWKKIADKWYYFNEEGAMKTGWVKYKDTWYYLDAKEGAMVSNAFIQSADGTGWYYLKPDGTLADRPEFTVEPDGLITVK

SEQ ID NO: 18 - protein, 828 aa, Streptococcus pneumoniae
MQLEISNRKRVSMKINKKYLVGSAAALILSVCSYELGLYQARTVKENNRVSYIDGKQATQKTENLTPDEVSKREGINAEQIVIKITDQGYVTSHGDHYHYYNGKVPYDAIFSEELLMKDPNYKLKDEDIVNEVKGGYVIKVDGKYYVYLKDAAHADNVRTKEEINRQKQEHSQHREGGTPRNDGAVALARSQGRYTTDDGYIFNASDIIEDTGDAYIVPHGDHYHYIPKNELSASELAAAEAFLSGRGNLSNSRTYRRQNSDNTSRTNWVPSVSNPGTTNTNTSNNSNTNSQASQSNDIDSLLKQLYKLPLSQRHVESDGLVFDPAQITSRTARGVAVPHGDHYHFIPYSQMSELEERIARIIPLRYRSNHWVPDSRPEQPSPQPTPEPSPGPQPAPNLKIDSNSSLVSQLVRKVGEGYVFEEKGISRYVFAKDLPSETVKNLESKLSKQESVSHTLTAKKENVAPRDQEFYDKAYNLLTEAHKALFENKGRNSDFQALDKLLERLNDESTNKEKLVDDLLAFLAPITHPERLGKPNSQIEYTEDEVRIAQLADKYTTSDGYIFDEHDIISDEGDAYVTPHMGHSHWIGKDSLSDKEKVAAQAYTKEKGILPPSPDADVKANPTGDSAAAIYNRVKGEKRIPLVRLPYMVEHTVEVKNGNLIIPHKDHYHNIKFAWFDDHTYKAPNGYTLEDLFATIKYYVEHPDERPHSNDGWGNASEHVLGKKDHSEDPNKNFKADEEPVEETPAEPEVPQVETEKVEAQLKEAEVLLAKVTDSSLKANATETLAGLRNNLTLQIMDNNSIMAEAEKLLALLKGSNPSSVSKEKIN

SEQ ID NO: 19 - protein, 819 aa, Streptococcus pneumoniae
  Xaa 578: Xaa is any amino acid e.g. K
MKINKKYLAGSVAVLALSVCSYELGRYQAGQDKKESNRVAYIDGDQAGQKAENLTPDEVSKREGINAEQIVIKITDQGYVTSHGDHYHYYNGKVPYDAIISEELLMKDPNYQLKDSDIVNEIKGGYVIKVNGKYYVYLKDAAHADNIRTKEEIKRQKQERSHNHNSRADNAVAAARAQGRYTTDDGYIFNASDIIEDTGDAYIVPHGDHYHYIPKNELSASELAAAEAYWNGKQGSRPSSSSSYNANPAQPRLSENHNLTVTPTYHQNQGENISSLLRELYAKPLSERHVESDGLIFDPAQITSRTARGVAVPHGNHYHFIPYEQMSELEKRIARIIPLRYRSNHWVPDSRPEEPSPQPTPEPSPSPQPAPSNPIDGKLVKEAVRKVGDGYVFEENGVSRYIPAKDLSAETAAGIDSKLAKQESLSHKLGTKKTDLPSSDREFYNKAYDLLARIHQDLLDNKGRQVDFEALDNLLERLKDVSSDKVKLVEDILAFLAPIRHPERLGKPNAQITYTDDEIQVAKLAGKYTAEDGYIFDPRDITSDEGDAYVTPHMTHSHWIKKDSLSEAERAAAQAYAXEKGLTPPSTDHQDSGNTEAKGAEAIYNRVKAAKKVPLDRMPYNLQYTVEVKNGSLIIPHYDHYHNIKFEWFDEGLYEAPKGYTLEDLLATVKYYVEHPNERPHSDNGFGNASDHVQRNKNGQADTNQTEKPSEEKPQTEKPEEETPREEKPQSEKPESPKPTEEPEESPEESEEPQVETEKVEEKLREAEDLLGKIQDPIIKSNAKETLTGLKNNLLFGTQDNNTIMAEAEKLLALLKESK

SEQ ID NO: 20 - protein, 853 aa, Streptococcus pneumoniae
MKINKKYLAGSVAVLALSVCSYELGRHQAGQVKKESNRVSYIDGDQAGQKAENLTPDEVSKREGINAEQIVIKITDQGYVTSHGDHYHYYNGKVPYDAIISEELLMKDPNYQLKDSDIVNEIKGGYVIKVDGKYYVYLKDAAHADNIRTKEEIKRQKQERSHNHNSRADNAVAAARAQGRYTTDDGYIFNASDIIEDTGDAYIVPHGDHYHYIPKSDLSASELAAAQAYWNGKQGSRPSSSSSHNANPAQPRLSENHNLTVTPTYHQNQGENISSLLRELYAKPLSERHVESDGLIFDPAQITSRTANGVAVPHGDHYHFIPYSQLSPLEEKLARIIPLRYRSNHWVPDSRPEQPSPQSTPEPSPSPQPAPNPQPAPSNPIDEKLVKEAVRKVGDGYVFEENGVPRYIPAKDLSAETAAGIDSKLAKQESLSHKLGAKKTDLPSSDREFYNKAYDLLARIHQDLLDNKGRQVDFEALDNLLERLKDVSSDKVKLVDDILAFLAPIRHPERLGKPNAQITYTDDEIQVAKLAGKYTTEDGYIFDPRDITSDEGDAYVTPHMTHSHWIKKDSLSEAERAAAQAYAKEKGLTPPSTDHQDSGNTEAKGAEAIYNRVKAAKKVPLDRMPYNLQYTVEVKNGSLIIPHYDHYHNIKFEWFDEGLYEAPKGYSLEDLLATVKYYVEHPNERPHSDNGFGNASDHVQRNKNGQADTNQTEKPNEEKPQTEKPEEDKEHDEVSEPTHPESDEKENHVGLNPSADNLYKPSTDTEETEEEAEDTTDEAEIPQVEHSVINAKIAEAEALLEKVTDSSIRQNAVETLTGLKSSLLLGTKDNNTISAEVDSLLALLKESQPTPIQ

SEQ ID NO: 21 - protein, 1039 aa, Streptococcus pneumoniae
MKFSKKYIAAGSAVIVSLSLCAYALNQHRSQENKDNNRVSYVDGSQSSQKSENLTPDQVSQKEGIQAEQIVIKITDQGYVTSHGDHYHYYNGKVPYDALFSEELLMKDPNYQLKDADIVNEVKGGYIIKVDGKYYVYLKDAAHADNVRTKDEINRQKQEHVKDNEKVNSNVAVARSQGRYTTNDGYVFNPADIIEDTGNAYIVPHGGHYHYIPKSDLSASELAAAKAHLAGKNMQPSQLSYSSTASDNNTQSVAKGSTSKPANKSENLQSLLKELYDSPSAQRYSESDGLVFDPAKIISRTPNGVAIPHGDHYHFIPYSKLSALEEKIARRVPISGTGSTVSTNAKPNEVVSSLGSLSSNPSSLTTSKELSSASDGYIFNPKDIVEETATAYIVRHGDHFHYIPKSNQIGQPTLPNNSLATPSPSLPINPGISHEKHEEDGYGFDANRIIAEDESGFIMSHGNHNHYFFKKDLTEEQIKAAQKHLEEVKTSHNGLDSLSSHEQDYPGNAKEMKDLDKKIEEKIAGIMKQYGVKRESIVVNKEKNAIIYPHGDHHHADPIDEHKPVGIGHSHSNYELFKPEEGVAKKEGNKVYTGEELTNVVNLLKNSTFNNQNFTLANGQKRVSFSFPPELEKKLGINMLVKLITPDGKVLEKVSGKVFGEGVGNIANFELDQPYLPGQTFKYTIASKDYPEVSYDGTFTVPTSLAYKMASQTIFYPFHAGDTYLRVNPQFAVPKGTDALVRVFDEFHGNAYLENNYKVGEIKLPIPKLNQGTTRTAGNKIPVTFMANAYLDNQSTYIVEVPILEKENQTDKPSILPQFKRNKAQENSKLDEKVEEPKTSEKVEKEKLSETGNSTSNSTLEEVPTVDPVQEKVAKFAESYGMKLENVLFNMDGTIELYLPSGEVIKKNMADFTGEAPQGNGENKPSENGKVSTGTVENQPTENKPADSLPEAPNEKPVKPENSTDNGMLNPEGNVGSDPMLDPALEEAPAVDPVQEKLEKFTASYGLGLDSVIFNMDGTIELRLPSGEVIKKNLSDLIA

SEQ ID NO: 22 - protein, 1876 aa, Streptococcus pneumoniae
MFKKDRFSIRKIKGVVGSVFLGSLLMAPSVVDAATYHYVNKEIISQEAKDLIQTGKPDRNEVVYGLVYQKDQLPQTGTEASVLTAFGLLTVGSLLLIYKRKKIASVFLVGTMGLVVLPSAGAVDPVATLALASREGVVEMEGYRYVGYLSGDILKTLGLDTVLEETSAKPGEVTVVEVETPQSTTNQEQARTENQVVETEEAPKEEAPKTEESPKEEPKSEVKPTDDTLPKVEEGKEDSAEPAPVEEVGGEVESKPEEKVAVKPESQPSDKPAEESKVEQAGEPVAPRKDEQAPVEPENQPEAPEEEKAVEETPKQEESTPDTKAEETVEPKEETKTAKGTQEEGKEGQAPVQEVNPEYKVTTGTVEKSTESELDFTTEVVPDDTKYVDEEVVERQGSKGVQVTKTTYETVEVVETDKVLSTTTEVKTPVVPKVVKKGTKPVETREEVIPFATKEQEDDTLKRGTRQVAQEGVNGKKQITETYKTIRGEKTNEAPTVEETVLQAPQDEIIKKGTKGLEKPTLQWANTEKDVLKKSATASYTLTKPAGVEIKSIKLALKDKDGQLVKEVTVAENNLNATLDKLKYYQGYTLSTTMVYDRGEGEETEKLEDKQIQLDLKKVEIKNIKETSLMNVDAEGNETDKSLLSEKPTDVSQLYLRVTTHDNKVTRLAVSSVEEVVVDGKTLYKVVAKAPDLVQRRADDTLSEEYVHYFEKQLPKVNNVYYNFNELVKDMQANPMGEFKLGADLNAVNVKPAGKAYVMAKFRGTLSSVENHQYTIHNLERPLFNEAEGATLKNFNLGNVNINMPWADKVAPIGNMFKKSTLENIKVVGSVTGNNDVTGAVNKLDEANMRNVAFIGKINSLGDKGWWSGGLVSESWRSNTDSVYFDGDIVGNNSKFGGLVAKVNHGSNQWDVKQKGRLTNSVVKGTMTLKNHGQSGGLVHENYDWGWVENNISMMKVNNGEIMYGSGSIDGDPYFGFDYFKNNYYVKDVATGESTYKRSKQIQSISQAEADAKIANMGITANTFAIQDPVVNKLNRIIDRDSEYKAIQDYQETRNLAYRNLEKLQPFYNKEWIVNQGNKLTDESNLVKKTVLSVTGMKSGQFVTDLSSVDKIMIHYADGTKEEFGVSAISDSRVKQVKEYNVDDLGVVYTPNMVDKNRDSLITKVKEKLSSVALDSAEVKSITNNPASLYLEESFAEVRETLDKLVKSLLENEDHQLNSDEVAEKALLKKVEDNKAKIILALTYLNRYYGIDYDGLNFKHLMMFKPDFYGKTPSILDFLIRIGSAEKNLKGDRSLEAYREVIGGTIGKGELNGLLGYNMRLFTKYTDLNDWFIHAAKNVYVSEPETTTEDFKDKRHRIYDGLNNDVHGRMILPLLNLKKAHIFVISTYNTIAFSSFEKYGKNTEEERNAYKAEIDRVAKAQQRYLDFWSRLALPKVRNQLLKSQNSVPTPVWDNQVYVGLGGANRMGYGDGGRVVTPVRELFGPTDRWHQINWNMGAMAKIYERPWKDDQVYFMVTNMMEPFGISAFTHETTHVNDRMAYYGGDWHREGTDLEAFAQGMLQTPDKSTTNGEYGALGINMAYERKNDGEQLYNYDPEKLDSREKIDSYMKNYNESMMMLDYLEASAVIRQNLSDNSKWFKKMDKEWRTNADRNRLIGEPHQWDKLRDLTEEEKKLPIDSIDKLVENNFVTLHGMPKNGRYRTEGFDSSYQPVNMMAGVFGGNTSKSTVGSISFKHNAFRMWGYYGYENGFIPYVSNKLKGAANKENKGLLGDDFIIKKVSKNQFQNLEEWKKHWYHEVYDKAQKGFVEIEVDGVKISTYAQLQSLFEEAVSKDLAGMDDKNIKNHYQYTENLKWKIYKQLLKNTDGFSSDLFTAPQA

SEQ ID NO: 23 - protein, 448 aa, Streptococcus pneumoniae
MKILPFIARGTSYYLKMSVKKLVPFLVVGLMLAAGDSVYAYSRGNGSIARGDDYPAYYKNGSQEIDQWRMYSRQCTSFVAFRLSNVNGFEIPAAYGNANEWGHRARREGYRVDNTPTIGSITWSTAGTYGHVAWVSNVMGDQIEIEEYNYGYTESYNKRVIKANTMTGFIHFKDLDSGSVGNSQSSASTGGTHYFKTKSAIKTEPLVSATVIDYYYPGEKVHYDQILEKDGYKWLSYTAYNGSYRYVQLEAVNKNPLGNSVLSSTGGTHYFKIKSAIKTEPLVSATVIDYYYPGEKVHYDQILEKDGYKWLSYTAYNGSRRYIQLEGVTSSQNYQNQSGNISSYGSNNSSTVGWKKINGSWYHFKSNGSKSTGWLKDGSSWYYLKLSGEMQTGWLKENGSWYYLGSSGAMKTGWYQVSGEWYYSYSSGALAINTTVDGYRVNSDGERV

SEQ ID NO: 24 - protein, 42 aa, Streptococcus pneumoniae
MLTDWQKVNGNWYYLNSNGAMVTGSQTIDGKVYNFASSGEWI

SEQ ID NO: 25 - protein, 204 aa, Streptococcus pneumoniae
MFKRIRRVLVLAVFLFAGYKAYRVHQDVKQVMTYQPMVREILSEQDTPANEELVLAMIYTETKGKEGDVMQSSESASGSTNTINDNASSIRQGIQTLTGNLYLAQKKGVDIWTAVQAYNFGPAYIDFIAQNGKENTLALAKQYSRETVAPLLGNRTGKTYSYIHPISIFHGAELYVNGGNYYYSRQVRLNLYIIKCFTLFSTSG

SEQ ID NO: 26 - protein, 339 aa, Streptococcus pneumoniae
MVKKNDLFVDVSSHNGYDITGILEQMGTTNTIIKISESTTYLNPCLSAQVEQSNPIGFYHFARFGGDVAEAEREAQFFLDNVPMQVKYLVLDYEDDPSGDAQANTNACLRFMQMIADAGYKPIYYSYKPFTHDNVDYQQILAQFPNSLWIAGYGLNDGTANFEYFPSMDGIRWWQYSSNPFDKNIVLLDDEEDDKPKTAGTWKQDSKGWWFRRNNGSFPYNKWEKIGGVWYYFDSKGYCLTSEWLKDNEKWYYLKDNGAMATGWVLVGSEWYYMDDSGAMVTGWVKYKNNWYYMTNERGNMVSNEFIKSGKGWYFMNTNGELADNPSFTKEPDGLITVA

SEQ ID NO: 27 - protein, 612 aa, Streptococcus pneumoniae
MFAFKKRRKVHYSIRKFSIGVASVAVASLFMGSVVHATEKEVTTQVATSSNKANKSQTEHMKAAKQVDEYIEKMLSEIQLDRRKHTQNVGLLTKLGAIKTEYLRGLSVSKEKSTAELPSEIKEKLTAAFEQFKKDTLKSGKKVAEAQKKAKDQKEAKQEIEALIVKHKGREIDLDRKKAKAAVTEHLKKLLNDIEKNLKKEQHTHTVELIKNLKDIEKTYLHKLDESTQKAQLQKLIAESQSKLDEAFSKFKNGLSSSSNSGSSTKPETPQPETPKPEVKPELETPKPEVKPEPETPKPEVKPEPETPKPEVKPELETPKPEVKPEPETPKPEVKPEPETPKPEVKPEPETPKPEVKPELETPKPEVKPELETPKPEVKPEPETPKPEVKPELETPKPEVKPEPETPKPEVKPELETPKPEVKPEPETPKPEVKPELETPKPEVKPEPETPKPEVKPEPETPKPEVKPEPETPKPEVKPELETPKQKVKPEPETPKPEVKPEPETPKPEVKPELETPKPEVKPELEIPKPEVKPDNSKPQADDKKPSTPNNLSKDKQSSNQASTNENKKQGPATNKPKKSLPSTGSISNLALEIAGLLTLAGATILAKKRMK

SEQ ID NO: 28 - protein, 313 aa, Streptococcus pneumoniae
MKKKLLAGAITLLSVATLAACSKGSEGADLISMKGDVITEHQFYEQVKNNPSAQQVLLNMTIQKVFEKQYGSELDDKEVDDTIAEEKKQYGENYQRVLSQAGMTLETRKAQIRTSKLVELAVKKVAEAELTDEAYKKAFDEYTPDVTAQIIRLNNEDKAKEVLEKAKAEGADFAQLAKDNSTDEKTKENGGEITFDSASTEVPEQVKKAAFALDVDGVSDVITATGTQAYSSQYYIVKLTKKTEKSSNIDDYKEKLKTVILTQKQNDSTFVQSIIGKELQAANIKVKDQAFQNIFTQYIGGGDSSSSSSTSNE

SEQ ID NO: 29 - protein, 619 aa, Streptococcus pneumoniae
MNKKKMILTSLASVAILGAGFVASQPTVVRAEESPVASQSKAEKDYDAAKKDAKNAKKAVEDAQKALDDAKAAQKKYDEDQKKTEEKAALEKAASEEMDKAVAAVQQAYLAYQQATDKAAKDAADKMIDEAKKREEEAKTKFNTVRAMVVPEPEQLAETKKKSEEAKQKAPELTKKLEEAKAKLEEAEKKATEAKQKVDAEEVAPQAKIAELENQVHRLEQELKEIDESESEDYAKEGFRAPLQSKLDAKKAKLSKLEELSDKIDELDAEIAKLEDQLKAAEENNNVEDYFKEGLEKTIAAKKAELEKTEADLKKAVNEPEKPAPAPETPAPEAPAEQPKPAPAPQPAPAPKPEKPAEQPKPEKTDDQQAEEDYARRSEEEYNRLTQQQPPKAEKPAPAPKTGWKQENGMWYFYNTDGSMATGWLQNNGSWYYLNSNGAMATGWLQYNGSWYYLNANGAMATGWAKVNGSWYYLNANGAMATGWLQYNGSWYYLNANGAMATGWAKVNGSWYYLNANGAMATGWLQYNGSWYYLNANGAMATGWAKVNGSWYYLNANGAMATGWVKDGDTWYYLEASGAMKASQWFKVSDKWYYVNGLGALAVNTTVDGYKVNANGEWV

SEQ ID NO: 30 - protein, 309 aa, Streptococcus pneumoniae
MKKLGTLLVLFLSAIILVACASGKKDTTSGQKLKVVATNSIIADITKNIAGDKIDLHSIVPIGQDPHEYEPLPEDVKKTSEADLIFYNGINLETGGNAWFTKLVENAKKTENKDYFAVSDGVDVIYLEGQNEKGKEDPHAWLNLENGIIFAKNIAKQLSAKDPNNKEFYEKNLKEYTDKLDKLDKESKDKFNKIPAEKKLIVTSEGAFKYFSKAYGVPSAYIWEINTEEEGTPEQIKTLVEKLRQTKVPSLFVESSVDDRPMKTVSQDTNIPIYAQIFTDSIAEQGKEGDSYYSMMKYNLDKIAEGLAK

SEQ ID NO: 31 - protein, 2144 aa, Streptococcus pneumoniae
MKKSTVLSLTTAAVILAAYAPNEVVLADTSSSEDALSISDKEKVVVDKETENKEKHKDIHNAIETSKDTEEKKTTIIEEKEVVSKNPVIDTKTSNEEAKIKEENSNQSQGDHTDSFVNKNTENPKKEDKVVYIAEFKDKESGEKAIKGLSNLKNTKVLYTYDRIFNGSAIETTPDNLDKIKQIEGISSIERAQKVQPMMNHARKEIGVEEAIDYLKSINAPFGKNFDGRGMVISNIDTGTDYRHKAMRIDDDAKASMRFKKEDLKGTDKNYWLSDKIPHAFNYYNGGKITVEKYDDGRDYFDPHGMHIAGILAGNDTEQDIKNFNGIDGIAPNAQIFSYKMYSDAGSGFAGDETMFHAIEDSIKHNVDVVSVSSGFTGTGLVGEKYWQAIRALRKAGIPMVVATGNYATSASSSSWDLVANNHLKMTDTGNVTRTAAHEDAIAVASAKNQTVEFDKVNIGGESFKYRNIGAFFDKNKITTNEDGTKAPSKLKFVYIGKGQDQDLIGLDLRGKIAVMDRIYTKDLKNAFKKAMDKGARAIMVVNTVNYYNRDNWTELPAMGYEADEGTKSQVFSISGDDGVKLWNMINPDKKTEVKRNNKEDFKDKLEQYYPIDMESFNSNKPNVGDEKEIDFKFAPDTDKELYKEDIIVPAGSTSWGPRIDLLLKPDVSAPGKNIKSTLNVINGKSTYGYMSGTSMATPIVAASTVLIRPKLKEMLERPVLKNLKGDDKIDLTSLTKIALQNTARPMMDATSWKEKSQYFASPRQQGAGLINVANALRNEVVATFKNTDSKGLVNSYGSISLKEIKGDKKYFTIKLHNTSNRPLTFKVSASAITTDSLTDRLKLDETYKDEKSPDGKQIVPEIHPEKVKGANITFEHGTFTIGANSSFDLNAVINVGEAKNKNKFVESFIHFESVEEMEALNSNGKKINFQPSLSMPLMGFAGNWNHEPILDKWAWEEGSRSKTLGGYDDDGKPKIPGTLNKGIGGEHGIDKFNPAGVIQNRKDKNTTSLDQNPELFAFNNQGINAPSSSGSKIANIYPLDSNGNPQDAQLERGLTPSPLVLRSAEEGLISIVNTNKEGENQRDLKVISREHFIRGILNSKSNDAKGIKSSKLKVWGDLKWDGLIYNPRGREENAPESKDNQDPATKIRGQFEPIAEGQYFYKFKYRLTKDYPWQVSYIPVKIDNTAPKIVSVDFSNPEKIKLITKDTYHKVKDQYKNETLFARDQKEHPEKFDEIANEVWYAGAALVNEDGEVEKNLEVTYAGEGQGRNRKLDKDGNTIYEIKGAGDLRGKIIEVIALDGSSNFTKIHRIKFADQADEKGMISYYLVDPDKDASKYEKLGEISEDKLKNAKSPEENTNNNQAKDEDSKPDEKSSVEGEASLEINKTISTIREFENKDLKKLIKKKFREVNDFTSETGKRIEEYDYKYDDKGNIIAYDDGSALQYETEKFDEIKSKIYGVLSPSKDGHFEILGKISNVSKNAKVYYGNSYKSIEIKATKYDSHSKTMIFDLYANINDIVDGLAFAGDMRLFVKDDNQIKAETKIRMPEKNKETKAEYPYVSSYGNVIELGEGDLSKNKPDNLTKMESGKIYSDSEKQQYLLKDNIILRKGYALKVTTYNPGKTDMLEGNGVYSKEDIAKIQKANPNLRVLSETTIYADSRNVEDGRSTQAVLMSALDGFNIIRYQVFTFKMNDKGEAIDKDGNLVTDSSKLVLFGKDDKEYTGEDKSNVEAIKEDGSMLFIDTKPVNLSMDKNYFNPSKSNKIYVRNPEFYLRGKISDKGGFNWELRVNESVVDNYLIYGDLHIDNTRDFNIKLNVKDGDIMDWGMKDYKANGFPDKVTDMDGNVYLQTGYSDLNAKAVGVHYQFLYDNVKPEVNIDPKGNTSIEYADGKSVVFNINDKRNNGFDGEIQEQHIYVNGKEYTSFDDIKQITDKTLNIKIVVKDFARNTTVKEFILNKDTGEVSELKPHRVTVTIQNGKEMSSTIVSEEDFILPVYKGELEKGYQFDGWEISGFEGKKDAGYVINLSKDTFIKPVFKKIEEKKEEENKPTFDVSKKKDNPQVNHSQLNESHRKEDLQREDHSQKSDSTKDVTATVLDKNNISSKSTTNNPNKLPKTGTASGAQTLLAAGIMFIVGIFLGLKKKNQD

SEQ ID NO: 32 - protein, 324 aa, Streptococcus pneumoniae
MRKKLFLTSAAILWAVTAMNSVHAATDVQKVIDETYVQPEYVLGSSLSEDQKNQTLKKLGYNASTDTKELKTMTPDVYSKIMNVANDSSLQLYSSAKIQKLGDKSPLEVKIETPENITKVTQDMYRNAAVTLGVEHAKITVAAPIPVTGESALAGIYYSLEANGAKVPQANKDLAQEELKALSDINAENKDKSGYDANKLNVALADIKSGLAKAKESKGNLTEEDIRKIVEDTLKNYKLDQVITGNQINIIINFALNLSKSDILSNADFTKTLNDLKQSIVSQAGDSFKNINLNFDSDKALEDGGNFLSSLWQALVNFFKSFGS

SEQ ID NO: 33 - protein, 339 aa, Streptococcus pneumoniae
MHAKMRNKKQINLGIIFVICLGLLITIFLSLKLGTKEINIRDFLAAFGMGNTNDDFIKSIIYKRIPRTIFAILAGSSLAISGVLMQSVTRNPIADPGILGINTGASLSVVIGLSFLGISSSISHISFAIIGGLVSAIFVYAIAVSGKAGLTPIKLALSGTCVSMALSSFVSFLILPNNNVLDKFRFWQIGSLGAATLSSISTLLPFIILGHLIAIFISSDLNALAMGDEMAVGLGVNVNRIRSLAIIASVLLCSSITAIGGPIGFVGLIVPHFCGLFISKDIRTMTISSAFIGAELLLICDIIGRMLGKPGEIEVGIITAIIGGPVLIYVTMKNRGVNT

SEQ ID NO: 34 - protein, 321 aa, Streptococcus pneumoniae
MKTSLKLYFTALVASFLLLLGACSTNSSTSQTETSSSAPTEITIKSSLDEVKLSKVPEKIVTFDLGAADTIRALGFEKNIVGMPTKTVPTYLKDLVGTVKNVGSMKEPDLEAIAALEPDLIIASPRTQKFVDKFKEIAPTVLFQASKDDYWTSTKANIESLASAFGETSTQKAKEELAKLDKSIQEVATKNESSDKKALAILLNEGKMAAFGAKSRFSFLYQTLKFKPTDTKFEDSRHGQEVSFESVKEINPDILFVINRTLAIGGDNSSNDGVLENALIAETPAAKNGKIIQLTPDLWYLSGGGLESTKLMIEDIQKALK

SEQ ID NO: 35 - protein, 122 aa, Streptococcus pneumoniae
MSKNIVQLNNSFIQNEYQRRRYLMKERQKRNRFMGGVLILIMLLFILPTFNLAQSYQQLLQRRQQLADLQTQYQTLSDEKDKETAFATKLKDEDYAAKYTRAKYYYSKSREKVYTIPDLLQR

SEQ ID NO: 36 - protein, 877 aa, Streptococcus pneumoniae
MDKKKLLLIDGSSVAFRAFFALYQQLDRFKNVAGLHTNAIYGFQLMLSHLLERVEPSHILVAFDAGKTTFRTEMYADYKGGRAKTPDEFREQFPFIRELLDHMGIRHYDLAQYEADDIIGTLDKLAEQDGFDITIVSGDKDLIQLTDEHTVVEISKKGVAEFEAFTPDYLMEEMGLTPAQFIDLKALMGDKSDNIPGVTKVGEKTGIKLLLEHGSLEGIYENIDGMKTSKMKENLINDKEQAFLSKTLATIDTKAPIAIGLEDLVYSGPDVENLGKFYDEMGFKQLKQALNVSSADVSESLDFTIVDQISQDMLSEESIFHFELFGENYHTDNLVGFVWSCGDKLYATDKLELLQDPIFKDFLEKTSLRVYDFKKVKVLLQRFGVDLQAPAFDIRLAKYLLSTVEDNEIATIASLYGQTYLVDDETFYGKGVKKAIPEREKFLEHLACKLAVLVETEPILLEKLSENGQLELLYDMEQPLAFVLAKMEIAGIMVKKETLLEMQAENELVIEKLTQEIYELAGEEFNVNSPKQLGVLLFEKLGLPLEYTKKTKTGYSTAVDVLERLAPIAPIVKKILDYRQIAKIQSTYVIGLQDWILADGKIHTRYVQDLTQTGRLSSVDPNLQNIPARLEQGRLIRKAFVPEWEDSVLLSSDYSQIELRVLAHISKDEHLIKAFQEGADIHTSTAMRVFGIERPDDVTANDRRNAKAVNFGVVYGISDFGLSNNLGISRKEAKAYIDTYFERFPGIKNYMDEVVREARDKGYVETLFKRRRELPDINSRNFNIRGFAERTAINSPIQGSAADILKIAMIQLDKALVAGGYQTKMLLQVHDEIVLEVPKSELVEMKKLVKQTMEEAIQLSVPLIADENEGATWYEAK

SEQ ID NO: 37 - protein, 211 aa, Streptococcus pneumoniae
MGMAAFKNPNNQYKAITIAQTLGDDASSEELAGRYGSAVQCTEVTASNLSTVKTKATVVEKPLKDFRASTSDQSGWVESNGKWYFYESGDVKTGWVKTDGKWYYLNDLGVMQTGFVKFSGSWYYLSNSGAMFTGWGTDGSRWFYFDGSGAMKTGWYKENGTWYYLDEAGIMKTGWFKVGPHWYYAYGSGALAVSTTTPDGYRVNGNGEWVN

SEQ ID NO: 38 - protein, 1856 aa, Streptococcus pneumoniae
MSRKSIGEKRHSFSMRKLSVGLVSVTVSSFFLMSQGIQSVSADNMESPIHYKYMTEGKLTDEEKSLLVEALPQLAEESDDTYYLVYRSQQFLPNTGFNPTVGTFLFTAGLSLLVLLVSKRENGKKRLVHFLLLTSMGVQLLPASAFGLTSQILSAYNSQLSIGVGEHLPEPLKIEGYQYIGYIKTKKQDNTELSRTVDGKYSAQRDSQPNSTKTSDVVHSADLEWNQGQGKVSLQGEASGDDGLSEKSSIAADNLSSNDSFASQVEQNPDHKGESVVRPTVPEQGNPVSATTVQSAEEEVLATTNDRPEYKLPLETKGTQEPGHEGEAAVREDLPVYTKPLETKGTQGPGHEGEAAVREEEPAYTEPLATKGTQEPGHEGKATVREETLEYTEPVATKGTQEPEHEGEAAVEEELPALEVTTRNRTEIQNIPYTTEEIQDPTLLKNRRKIERQGQAGTRTIQYEDYIVNGNVVETKEVSRTEVAPVNEVVKVGTLVKVKPTVEITNLTKVENKKSITVSYNLIDTTSAYVSAKTQVFHGDKLVKEVDIENPAKEQVISGLDYYTPYTVKTHLTYNLGENNEENTETSTQDFQLEYKKIEIKDIDSVELYGKENDRYRRYLSLSEAPTDTAKYFVKVKSDRFKEMYLPVKSITENTDGTYKVTVAVDQLVEEGTDGYKDDYTFTVAKSKAEQPGVYTSFKQLVTAMQSNLSGVYTLASDMTADEVSLGDKQTSYLTGAFTGSLIGSDGTKSYAIYDLKKPLFDTLNGATVRDLDIKTVSADSKENVAALAKAANSANINNVAVEGKISGAKSVAGLVASATNTVIENSSFTGKLIANHQDSNKNDTGGIVGNITGNSSRVNKVRVDALISTNARNNNQTAGGIVGRLENGALISNSVATGEIRNGQGYSRVGGIVGSTWQNGRVNNVVSNVDVGDGYVITGDQYAAADVKNASTSVDNRKADRFATKLSKDQIDAKVADYGITVTLDDTGQDLKRNLREVDYTRLNKAEAERKVAYSNIEKLMPFYNKDLVVHYGNKVATTDKLYTTELLDVVPMKDDEVVTDINNKKNSINKVMLHFKDNTVEYLDVTFKENFINSQVIEYNVTGKEYIFTPEAFVSDYTAITNNVLSDLQNVTLNSEATKKVLGAANDAALDNLYLDRQFEEVKANIAEHLRKVLAMDKSINTTGDGVVEYVSEKIKNNKEAFMLGLTYMNRWYDINYGKMNTKDLSTYKFDFNGNNETSTLDTIVALGNSGLDNLRASNTVGLYANKLASVKGEDSVFDFVEAYRKLFLPNKTNNEWFKENTKAYIVEMKSDIAEVREKQESPTADRKYSLGVYDRISAPSWGHKSMLLPLLTLPEESVYISSNMSTLAFGSYERYRDSVDGVILSGDALRTYVRNRVDIAAKRHRDHYDIWYNLLDSASKEKLFRSVIVYDGFNVKDETGRTYWARLTDKNIGSIKEFFGPVGKWYEYNSSAGAYANGSLTHFVLDRLLDAYGTSVYTHEMVHNSDSAIYFEGNGRREGLGAELYALGLLQSVDSVNSHILALNTLYKAEKDDLNRLHTYNPVERFDSDEALQSYMHGSYDVMYTLDAMEAKAILAQNNDVKKKWFRKIENYYVRDTRHNKDTHAGNKVRPLTDEEVANLTSLNSLIDNDIINRRSYDDSREYKRNGYYTISMFSPVYAALSNSKGAPGDIMFRKIAYELLAEKGYHKGFLPYVSNQYGAEAFASGSKTFSSWHGRDVALVTDDLVFKKVFNGEYSSWADFKKAMFKQRIDKQDNLKPITIQYELGNPNSTKEVTITTAAQMQQLINEAAAKDITNIDRATSHTPASWVHLLKQKIYNAYLRTTDDFRNSIYK

SEQ ID NO: 39 - protein, 857 aa, Streptococcus pneumoniae
MKFNPNQRYTRWSIRRLSVGVASVVVASGFFVLVGQPSSVRADGLNPTPGQVLPEETSGTKEGDLSEKPGDTVLTQAKPEGVTGNTNSLPTPTERTEVSEETSPSSLDTLFEKDEEAQKNPELTDVLKETVDTADVDGTQASPAETTPEQVKGGVKENTKDSIDVPAAYLEKAEGKGPFTAGVNQVIPYELFAGDGMLTRLLLKASDNAPWSDNGTAKNPALPPLEGLTKGKYFYEVDLNGNTVGKQGQALIDQLRANGTQTYKATVKVYGNKDGKADLTNLVATKNVDININGLVAKETVQKAVADNVKDSIDVPAAYLEKAKGEGPFTAGVNHVIPYELFAGDGMLTRLLLKASDKAPWSDNGDAKNPALSPLGENVKTKGQYFYQVALDGNVAGKEKQALIDQFRANGTQTYSATVNVYGNKDGKPDLDNIVATKKVTININGLISKETVQKAVADNVKDSIDVPAAYLEKAKGEGPFTAGVNHVIPYELFAGDGMLTRLLLKASDKAPWSDNGDAKNPALSPLGENVKTKGQYFYQLALDGNVAGKEKQALIDQFRANGTQTYSATVNVYGNKDGKPDLDNIVATKKVTININGLISKETVQKAVADNVKDSIDVPAAYLEKAKGEGPFTAGVNHVIPYELFAGDGMLTRLLLKASDKAPWSDNGDAKNPALSPLGENVKTKGQYFYQVALDGNVAGKEKQALIDQFRANGTQTYSATVNVYGNKDGKPDLDNIVATKKVTIKINVKETSDTANGSLSPSNSGSGVTPMNHNHATGTTDSMPADTMTSSTNTMAGENMAASANKMSDTMMSEDKAMLPNTGETQTSMASIGFLGLALAGLLGGLGLKNKKEEN

SEQ ID NO: 40 - protein, 195 aa, Streptococcus pneumoniae
MKSITKKIKATLAGVAALFAVFAPSFVSAQESSTYTVKEGDTLSEIAETHNTTVEKLAENNHIDNIHLIYVDQELVIDGPVAPVATPAPATYAAPAAQDETVSAPVAETPVVSETVVSTVSGSEAEAKEWIAQKESGGSYTATNGRYIGRYQLTDSYLNGDYSAENQERVADAYVAGRYGSWTAAKNFWLNNGWY

SEQ ID NO: 41 - protein, 189 aa, Streptococcus pneumoniae
MKKIVLVSLAFLFVLVGCGQKKETGPATKTEKDTLQSALPVIENAEKNTVVTKTLVLPKSDDGSQQTQTITYKDKTFLSLAIQQKRPVSDELKTYIDQHGVEETQKALLEAEEKDKSIIEARKLAGFKLETKLLSATELQTTTSFDFQVLDVKKASQLEHLKNIGLENLLKNEPSKYISDRLANGATEQ

SEQ ID NO: 42 - protein, 416 aa, Streptococcus pneumoniae
MFEVEEWLHSRIGLNFRSGLGRMQQAVDLLGNPEQSYPIIHVTGTNGKGSTIAFMRELFMGHGKKVATFTSPHIVSINDRICINGQPIADADFIRLTDQVKEMEKTLLQTPAQLSFFELLTLVAFLYFREQEVDLVLLEVGIGGLLDTTNVVTGEFAVITSIGLDHQETLGDSLEAIAEQKAGIFKAGKKAVIAKLPPEARLACQKKAESLAVNLYQAGQDFLMLNGDFSSSLLNLSQLNIGLEGVYQQENAALALQTFLLFMRERKEAVDEQAVRKALEQTHWAGRLERIRPQIYLDGAHNLPALTRLAEFIKEKEQEGYRPQILFGSLKRKDYQGMLGYLTEKLPQVELKVTGFDYQGALDERDVTGYDIVSSYREFISDFEERADAQDLLFVTGSLYFISEVRGYLLDREQIN

SEQ ID NO: 43 - protein, 277 aa, Streptococcus pneumoniae
VGIRVYKPTTNGRRNMTSLDFAEITTSTPEKSLLVALKSKAGRNNNGRITVRHQGGGHKRFYRLVDFKRNKDNVEAVVKTIEYDPNRSANIALVHYTDGVKAYIIAPKGLEVGQRIVSGPEADIKVGNALPLANIPVGTLIHNIELKPGRGGELVRAAGASAQVLGSEGKYVLVRLQSGEVRMILGTCRATVGVVGNEQHGLVNLGKAGRSRWKGIRPTVRGSVMNPNDHPHGGGEGKAPVGRKAPSTPWGKPALGLKTRNKKAKSDKLIVRRRNEK

SEQ ID NO: 44 - protein, 89 aa, Streptococcus pneumoniae
MAKKSMVAREAKRQKIVDRYAEKRAALKAAGDYEGLSKLPRNASPTRLHNRCRVTGRPHSVYRKFGLSRIAFRELAHKGQIPGVTKASW

SEQ ID NO: 45 - protein, 445 aa, Streptococcus pneumoniae
MDIRQVTETIAMIEEQNFDIRTITMGISLLDCIDPDINRAAEKIYQKITTKAANLVAVGDEIAAELGIPIVNKRVSVTPISLIGAATDATDYVVLAKALDKAAKEIGVDFIGGFSALVQKGYQKGDEILINSIPRALAETDKVCSSVNIGSTKSGINMTAVADMGRIIKETANLSDMGVAKLVVFANAVEDNPFMAGAFHGVGEADVIINVGVSGPGVVKRALEKVRGQSFDVVAETVKKTAFKITRIGQLVGQMASERLGVEFGIVDLSLAPTPAVGDSVARVLEEMGLETVGTHGTTAALALLNDQVKKGGVMACNQVGGLSGAFIPVSEDEGMIAAVQNGSLNLEKLEAMTAICSVGLDMIAIPEDTPAETIAAMIADEAAIGVINMKTTAVRIIPKGKEGDMIEFGGLLGTAPVMKVNGASSVDFISRGGQIPAPIHSFKN

SEQ ID NO: 46 - protein, 812 aa, Streptococcus pneumoniae
MVNTEVARTTIKTEYFGSLTERMNKYREDVLNKKPYIDAERAVLATRAYERYKEQPNVLKRAYMLKEILENMTIYIEEESMIAGNQASSNKDAPIFPEYTLEFVLNELDLFEKRDGDVFYITEETKEQLRSIAPFWENNNLRARAGALLPEEVSVYMETGFFGMEGKMNSGDAHLAVNYQKLLQFGLRGFEERARKAKVALDLTDPASIDKYHFYDSIFIVIDAIKVYAKRFVALAKSLAENANPKRKKELLEIADICSRVPYEPATTFAEAIQSVWFIQCILQIESNGHSLSYGRFDQYMYPYMKADLESGKETEDSIVERLTNLWIKTITINKVRSQSHTFSSAGSPLYQNVTIGGQTRDKKDAVNPLSYLVLKSVAQTHLPQPNLTVRYHAGLDARFMNECIEVMKLGFGMPAFNNDEIIIPSFIAKGVLEDDAYDYSAIGCVETAVPGKWGYRCTGMSYMNFPKVLLITMNDGIDPASGKRFAPSFGRFKDMKNFSELENAWDKTLRYLTRMSVIVENSIDLSLEREVPDILCSALTDDCIGRGKHLKEGGAVYDYISGLQVGIANLSDSLAAIKKLVFEEERISPSQLWHALETDYAGEEGKVIQEMLIHDAPKYGNDDDYADKLVTAAYDIYVDEIAKYPNTRYGRGPIGGIRYSGTSSISANVGQGRGTLATPDGRNAGTPLAEGCSPSHNMDQHGPTSVLKSVSKLPTDEIVGGVLLNQKVNPQTLAKEEDKLKLIALLRTFFNRLHGYHIQYNVVSRETLIDAQKHPEKHRDLIVRVAGYSAFFNVLSKATQDDIIGRTEHTL

SEQ ID NO: 47 - protein, 130 aa, Streptococcus pneumoniae
MSQAQYAGTGRRKNAVARVRLVPGTGKITVNKKDVEEYIPHADLRLVINQPFAVTSTVGSYDVFVNVIGGGYAGQSGAIRHGIARALLQVDPDFRDSLKRAGLLTRDSRKVERKKPGLKKARKASQFSKR

SEQ ID NO: 48 - protein, 333 aa, Streptococcus pneumoniae
LEKKLTIKDIAEMAQTSKTTVSFYLNGKYEKMSQETREKIEKVIHETNYKPSIVARSLNSKRTKLIGVLIGDITNSFSNQIVKGIEDIASQNGYQVMIGNSNYSQESEDRYIESMLLLGVDGFIIQPTSNFRKYSRIIDEKKKKMVFFDSQLYEHRTSWVKTNNYDAVYDMTQSCIEKGYEHFLLITADTSRLSTRIERASGFVDALTDANMRHASLTIEDKHTNLEQIKEFLQKEIDPDEKTLVFIPNCWALPLVFTVIKELNYNLPQVGLIGFDNTEWTCFSSPSVSTLVQPSFEEGQQATKILIDQIEGRNQEERQQVLDCSVNWKESTF

SEQ ID NO: 49 - protein, 1767 aa, Streptococcus pneumoniae
MNKGLFEKRCKYSIRKFSLGVASVMIGAAFFGTSPVLADSVQSGSTANLPADLATALATAKENDGRDFEAPKVGEDQGSPEVTDGPKTEEELLALEKEKPAEEKPKEDKPAAAKPETPKTVTPEWQTVANKEQQGTVTIREEKGVRYNQLSSTAQNDNAGKPALFEKKGLTVDANGNATVDLTFKDDSEKGKSRFGVFLKFKDTKNNVFVGYDKDGWFWEYKSPTTSTWYRGSRVAAPETGSTNRLSITLKSDGQLNASNNDVNLFDTVTLPAAVNDHLKNEKKILLKAGSYDDERTVVSVKTDNQEGVKTEDTPAEKETGPEVDDSKVTYDTIQSKVLKAVIDQAFPRVKEYSLNGHTLPGQVQQFNQVFINNHRITPEVTYKKINETTAEYLMKLRDDAHLINAEMTVRLQVVDNQLHFDVTKIVNHNQVTPGQKIDDESKLLSSISFLGNALVSVSSNQTGAKFDGATMSNNTHVSGDDHIDVTNPMKDLAKGYMYGFVSTDKLAAGVWSNSQNSYGGGSNDWTRLTAYKETVGNANYVGIHSSEWQWEKAYKGIVFPEYTKELPSAKVVITEDANADKNVDWQDGAIAYRSIMNNPQGWEKVKDITAYRIAMNFGSQAQNPFLMTLDGIKKINLHTDGLGQGVLLKGYGSEGHDSGHLNYADIGKRIGGVEDFKTLIEKAKKYGAHLGIHVNASETYPESKYFNEKILRKNPDGSYSYGWNWLDQGINIDAAYDLAHGRLARWEDLKKKLGDGLDFIYVDVWGNGQSGDNGAWATHVLAKEINKQGWRFAIEWGHGGEYDSTFHHWAADLTYGGYTNKGINSAITRFIRNHQKDAWVGDYRSYGGAANYPLLGGYSMKDFEGWQGRSDYNGYVTNLFAHDVMTKYFQHFTVSKWENGTPVTMTDNGSTYKWTPEMRVELVDADNNKVVVTRKSNDVNSPQYRERTVTLNGRVIQDGSAYLTPWNWDANGKKLSTDKEKMYYFNTQAGATTWTLPSDWAKSKVYLYKLTDQGKTEEQELTVKDGKITLDLLANQPYVLYRSKQTNPEMSWSEGMHIYDQGFNSGTLKHWTISGDASKAEIVKSQGANDMLRIQGNKEKVSLTQKLTGLKPNTKYAVYVGVDNRSNAKASITVNTGEKEVTTYTNKSLALNYVKAYAHNTRRDNATVDDTSYFQNMYAFFTTGADVSNVTLTLSREAGDQATYFDEIRTFENNSSMYGDKHDTGKGTFKQDFENVAQGIFPFVVGGVEGVEDNRTHLSEKHNPYTQRGWNGKKVDDVIEGNWSLKTNGLVSRRNLVYQTIPQNFRFEAGKTYRVTFEYEAGSDNTYAFVVGKGEFQSGRRGTQASNLEMHELPNTWTDSKKAKKATFLVTGAETGDTWVGIYSTGNASNTRGDSGGNANFRGYNDFMMDNLQIEEITLTGKMLTENALKNYLPTVAMTNYTKESMDALKEAVFNLSQADDDISVEEARAEIAKIEALKNALVQKKTALVADDFASLTAPAQAQEGLANAFDGNVSSLWHTSWNGGDVGKPATMVLKEPTEITGLRYVPRGSGSNGNLRDVKLVVTDESGKEHTFTATDWPNNNKPKDIDFGKTIKAKKIVLTGTKTYGDGGDKYQSAAELIFTRPQVAETPLDLSGYEAALVKAQKLTDKDNQEEVASVQASMKYATDNHLLTERMVEYFADYLNQLKDSATKPDAPTVEKPEFKLRSLASEQGKTPDYKQEIARPETPEQILPATGESQSDTALILASVSLALSALFVVKTKKD

SEQ ID NO: 50 - protein, 719 aa, Streptococcus pneumoniae
MNKPTILRLIKYLSISFLSLVIAAIVLGGGVFFYYVSKAPSLSESKLVATTSSKIYDNKNQLIADLGSERRVNAQANDIPTDLVKAIVSIEDHRFFDHRGIDTIRILGAFLRNLQSNSLQGGSTLTQQLIKLTYFSTSTSDQTISRKAQEAWLAIQLEQKATKQEILTYYINKVYMSNGNYGMQTAAQNYYGKDLNNLSLPQLALLAGMPQAPNQYDPYSHPEAAQDRRNLVLSEMKNQGYISAEQYEKAVNTPITDGLQSLKSASNYPAYMDNYLKEVINQVEEETGYNLLTTGMDVYTNVDQEAQKHLWDIYNTDEYVAYPDDELQVASTIVDVSNGKVIAQLGARHQSSNVSFGINQAVETNRDWGSTMKPITDYAPALEYGVYDSTATIVHDEPYNYPGTNTPVYNWDRGYFGNITLQYALQQSRNVPAVETLNKVGLNRAKTFLNGLGIDYPSIHYSNAISSNTTESDKKYGASSEKMAAAYAAFANGGTYYKPMYIHKVVFSDGSEKEFSNVGTRAMKETTAYMMTDMMKTVLTYGTGRNAYLAWLPQAGKTGTSNYTDEEIENHIKTSQFVAPDELFAGYTRKYSMAVWTGYSNRLTPLVGNGLTVAAKVYRSMMTYLSEGSNPEDWNIPEGLYRNGEFVFKNGARSTWNSPAPQQPPSTESSSSSSDSSTSQSSSTTPSTNNSTTTNPNNNTQQSNTTPDQQNQNPQPAQP

SEQ ID NO: 51 - protein, 464 aa, Streptococcus pneumoniae
MSKKRRNRHKKEGQEPQFDFDEAKELTVGQAIRKNEEVESGVLPEDSILDKYVKQHRDEIEADKFATRQYKKEEFVETQSLDDLIQEMREAVEKSEASSEEVPSSEDILLPLPLDDEEQGLDPLLLDDENPTEMTEEVEEEQNLSRLDQEDSEKKSKKGFILTVLALVSVIICVSAYYVYRQVARSTKEIETSQSTTANQSDVDDFNTLYDAFYTDSNKTALKNSQFDKLSQLKTLLDKLEGSREHTLAKSKYDSLATQIKAIQDVNAQFEKPAIVDGVLDTNAKAKSDAKFTDIKTGNTELDKVLDKAISLGKSQQTSTSSSSSSQTSSSSSSQASSNTTSEPKPSSSNETRSSRSEVNMGLSSAGVAVQRSASRVAYNQSAIDDSNNSAWDFADGVLEQILATSRSRGYITGDQYILERVNIVNGNGYYNLYKPDGTYLFTLNCKTGYFVGNGAGHADDLDY

SEQ ID NO: 52 - protein, 340 aa, Streptococcus pneumoniae
MKLLKKMMQVALAVFFFGLLATNTVFANTTGGRFVDKDNRKYYVKDDHKAIYWHKIDGKTYYFGDIGEMVVGWQYLEIPGTGYRDNLFDNQPVNEIGLQEKWYYFGQDGALLEQTDKQVLEAKTSENTGKVYGEQYPLSAEKRTYYFDNNYAVKTGWIYEEGHWYYLNKLGNFGDDSYNPLPIGEVAKGWTQDFHVTIDIDRSKPAPWYYLDASGKMLTDWQKVNGKWYYFGSSGSMATGWKYVRGKWYYLDNKNGDMKTGWQYLGNKWYYLRSSGAMVTGWYQDGSTWYYLDPSNGDMKIGWTKVNGKWYYLNSNGAMVTGSQTIDGKVYNFASSGEWI

SEQ ID NO: 53 - protein, 332 aa, Streptococcus pneumoniae
MKILKKTMQVGLTVFFFGLLGTSTVFADDSEGWQFVQENGRTYYKKGDLKETYWRVIDGKYYYFDSLSGEMVVGWQYIPFPSKGSTIGPYPNGIRLEGFPKSEWYYFDKNGVLQEFVGWKTLEIKTKDSVGRKYGEKREDSEDKEEKRYYTNYYFNQNHSLETGWLYDQSNWYYLAKTEINGENYLGGERRAGWINDDSTWYYLDPTTGIMQTGWQYLGNKWYYLRSSGAMATGWYQEGTTWYYLDHPNGDMKTGWQNLGNKWYYLRSSGAMATGWYQDGSTWYYLNAGNGDMKTGWFQVNGNWYYAYSSGALAVNTTVDGYSVNYNGEWVR

SEQ ID NO: 54 - protein, 285 aa, Streptococcus pneumoniae
MVLSKYYGVADGMNVEGRGSANFIKDNVLITAAHNYYRHDYGKEADDIYVLPAVSPSQEPFGKIKVKEVRYLKEFRNLNSKDAREYDLALLILEEPIGAKLGTLGLPTSQKNLTGITVTITGYPSYNFKIHQMYTDKKQVLSDDGMFLDYQVDTLEGSSGSTVYDASHRVVGVHTLGDGANQINSAVKLNERNLPFIYSVLKGYSLEGWKKINGSWYHYRQHDKQTGWQEINDTWYYLDSSGKMLTDWQKVNGKWYYLNSNGAMVTGSQTIDGKVYNFASSGEWI

SEQ ID NO: 55 - protein, 630 aa, Streptococcus pneumoniae
LMKKTFFLLVLGLFCLLPLSVFAIDFKINSYQGDLYIHADNTAEFRQKIVYQFEEDFKGQIVGLGRAGKMPSGFDIDPHPKIQAAKNGAELADVTSEVTEEADGYTVRVYNPGQEGDIVEVDLVWNLKNLLFLYDDIAELNWQPLTDSSESIEKFEFHVRGDKGAEKLFFHTGKLFREGTIEKSNLDYTIRLDNLPAKRGVELHAYWPRTDFASARDQGLKGNRLEEFNKIEDSIVREKDQSKQLVTWVLPSILSISLLLSVCFYFIYRRKTTPSVKYAKNHRLYEPPMELEPMVLSEAVYSTSLEEVSPLVKGAGKFTFDQLIQATLLDVIDRGNVSIISEGDAVGLRLVKEDGLSSFEKDCLNLAFSGKKEETLSNLFADYKVSDSLYRRAKVSDEKRIQARGLQLKSSFEEVLNQMQEGVRKRVSFWGLPDYYRPLTGGEKALQVGMGALTILPLFIGFGLFLYSLDVHGYLYLPLPILGFLGLVLSVFYYWKLRLDNRDGVLNEAGAEVYYLWTSFENMLREIARLDQAELESIVVWNRLLVYATLFGYADKVSHLMKVHQIQVENPDINLYVAYGWHSTFYHSTAQMSHYASVANTASTYSVSSGSGSSGGGFSGGGGGGSIGAF

SEQ ID NO: 56 - protein, 665 aa, Streptococcus pneumoniae
MKSINKFLTMLAALLLTASSLFSAATVFAAGTTTTSVTVHKLLATDGDMDKIANELETGNYAGNKVGVLPANAKEIAGVMFVWTNTNNEIIDENGQTLGVNIDPQTFKLSGAMPATAMKKLTEAEGAKFNTANLPAAKYKIYEIHSLSTYVGEDGATLTGSKAVPIEIELPLNDVVDAHVYPKNTEAKPKIDKDFKGKANPDTPRVDKDTPVNHQVGDVVEYEIVTKIPALANYATANWSDRMTEGLAFNKGTVKVTVDDVALEAGDYALTEVATGFDLKLTDAGLAKVNDQNAEKTVKITYSATLNDKAIVEVPESNDVTFNYGNNPDHGNTPKPNKPNENGDLTLTKTWVDATGAPIPAGAEATFDLVNAQTGKVVQTVTLTTDKNTVTVNGLDKNTEYKFVERSIKGYSADYQEITTAGEIAVKNWKDENPKPLDPTEPKVVTYGKKFVKVNDKDNRLAGAEFVIANADNAGQYLARKADKVSQEEKQLVVTTKDALDRAVAAYNALTAQQQTQQEKEKVDKAQAAYNAAVIAANNAFEWVADKDNENVVKLVSDAQGRFEITGLLAGTYYLEETKQPAGYALLTSRQKFEVTATSYSATGQGIEYTAGSGKDDATKVVNKKITIPQTGGIGTIIFAVAGAAIMGIAVYAYVKNNKDEDQLA

SEQ ID NO: 57 - protein, 279 aa, Streptococcus pneumoniae
MAVMAYPLVSRLYYRVESNQQIADFDKEKATLDEADIDERMKLAQAFNDSLNNVVSGDPWSEEMKKKGRAEYARMLEIHERMGHVEIPVIDVDLPVYAGTAEEVLQQGAGHLEGTSLPIGGNSTHAVITAHTGLPTAKMFTDLTKLKVGDKFYVHNIKEVMAYQVDQVKVIEPTNFDDLLIVPGHDYVTLLTCTPYMINTHRLLVRGHRIPYVAEVEEEFIAANKLSHLYRYLFYVAVGLIVILLWIIRRLRKKKKQPEKALKALKAARKEVKVEDGQQ

SEQ ID NO: 58 - protein, 283 aa, Streptococcus pneumoniae
MSRTKLRALLGYLLMLVACLIPIYCFGQMVLQSLGQVKGHATFVKSMTTEMYQEQQNHSLAYNQRLASQNRIVDPFLAEGYEVNYQVSDDPDAVYGYLSIPSLEIMEPVYLGADYHHLGMGLAHVDGTPLPLDGTGIRSVIAGHRAEPSHVFFRHLDQLKVGDALYYDNGQEIVEYQMMDTEIILPSEWEKLESVSSKNIMTLITCDPIPTFNKRLLVNFERVAVYQKSDPQTAAVARVAFTKEGQSVSRVATSQWLYRGLVVLAFLGILFVLWKLARLLRGK

SEQ ID NO: 59 - protein, 1659 aa, Streptococcus pneumoniae
MKNPFFERRCRYSIRKLSVGACSLMIGAVLFAGPALAEETAVPENSGANTELVSGESEHSTNEADKQNEGEHARENKLEKAEGVAIASETASPASNEAATTETAEAASAAKPEEKASEVVAETPSAEAKPKSDKETEAKPEATNQGDESKPAAEANKTEKEVQPDVPKNTEKTLKPKEIKFNSWEELLKWEPGAREDDAINRGSVVLASRRTGHLVNEKASKEAKVQALSNTNSKAKDHASVGGEEFKAYAFDYWQYLDSMVFWEGLVPTPDVIDAGHRNGVPVYGTLFFNWSNSIADQERFAEALKQDADGSFPIARKLVDMAKYYGYDGYFINQETTGDLVKPLGEKMRQFMLYSKEYAAKVNHPIKYSWYDAMTYNYGRYHQDGLGEYNYQFMQPEGDKVPADNFFANFNWDKAKNDYTIATANWIGRNPYDVFAGLELQQGGSYKTKVKWNDILDENGKLRLSLGLFAPDTITSLGKTGEDYHKNEDIFFTGYQGDPTGQKPGDKDWYGIANLVADRTPAVGNTFTTSFNTGHGKKWFVDGKVSKDSEWNYRSVSGVLPTWRWWQTSTGEKLRAEYDFTDAYNGGNSLKFSGDVAGKTDQDVRLYSTKLEVTEKTKLRVAHKGGKGSKVYMAFSTTPDYKFDDADAWKELTLSDNWTNEEFDLSSLAGKTIYAVKLFFEHEGAVKDYQFNLGQLTISDNHQEPQSPTSFSVVKQSLKNAQEAEAVVQFKGNKDADFYEVYEKDGDSWKLLTGSSSTTIYLPKVSRSASAQGTTQELKVVAVGKNGVRSEAATTTFDWGMTVKDTSLPKPLAENIVPGATVIDSTFPKTEGGEGIEGMLNGTITSLSDKWSSAQLSGSVDIRLTKPRTVVRWVMDHAGAGGESVNDGLMNTKDFDLYYKDADGEWKLAKEVRGNKAHVTDITLDKPITAQDWRLNVVTSDNGTPWKAIRIYNWKMYEKLDTESVNIPMAKAAARSLGNNKVQVGFADVPAGATITVYDNPNSQTPLATLKSEVGGDLASAPLDLTNQSGLLYYRTQLPGKEISNVLAVSVPKDDRRIKSVSLETGPKKTSYAEGEDLDLRGGVLRVQYEGGTEDELIRLTHAGVSVSGFDTHHKGEQNLTLQYLGQPVNANLSVTVTGQDEASPKTILGIEVSQEPKKDYLVGDSLDLSEGRFAVAYSNDTMEEHSFTDEGVEISGYDAQKTGRQTLTLHYQGHEVSFDVLVSPKAALNDEYLKQKLAEVEAAKNKVVYNFASSEVKEAFLKAIEAAEQVLKDHETSTQDQVNDRLNKLTEAHKALNGQEKFTEEKTELDRLTGEVQELLAAKPNHPSGSALAPLLEKNKALVEKVDLSPEELTTAKQSLKDLVALLKEDKPAVFSDSKTGVEVHFSNKEKTVIKGLKVERVQASAEEKKYFAGEDAHVFEIEGLDEKGQDVDLSYASIVKIPIEKDKKVKKVFFLPEGKEAVELAFEQTDSHVIFTAPHFTHYAFVYESAEKPQPAKPAPQNTVLPKPTYQPTSDQQKAPKLEVQEEKVAFHRQEHENTEMLVGEQRVIIQGRDGLLRHVFEVDENGQRRLRSTEVIQEAIPEIVEIGTKVKTVPAVVATQEKPAQNTAVKSEEASKQLPNTGTADANEALIAGLASLGLASLALTLRRKREDKD

SEQ ID NO: 60 - protein, 487 aa, Streptococcus pneumoniae
MSITSFVKRIQDITRNDAGVNGDAQRIEQMSWLLFLKIYDSREMVWELEEDEYESIIPEELKWRNWAHAQNGERVLTGDELLDFVNNKLFKELKELEITSNMPIRKTIVKSAFEDANNYMKNGVLLRQVINVIDEVDFNSPEDRHSFNDIYEKILKDIQNAGNSGEFYTPRAATDFIAEVLDPKLGESMADLACGTGGFLTSTLNRLSSQRKTSEDTKKYNTAVFGIEKKAFPHLLAVTNLFLHEIDDPKIVHGNTLEKNVREYTDDEKFDIIMMNPPFGGSELETIKNNFPAELRSSETADLFMAVIMYRLKENGRVGVILPDGFLFGEGVKTRLKQKLVDEFNLHTIIRLPHSVFAPYTGIHTNILFFDKTKKTEETWFYRLDMPDGYKNFSKTKPMKSEHFNPVRDWWENREEILEGKFYKSKSFTPSELAELNYNLDQCDFPKEEEEILNPFELIQNYQAERATLNHKIDNVLADILQLLEDK

SEQ ID NO: 61 - protein, 378 aa, Streptococcus pneumoniae
MNNTEFYDRLGVSKNASADEIKKAYRKLSKKYHPDINKEPGAEDKYKEVQEAYETLSDDQKRAAYDQYGAAGANGGFGGAGGFGGFNGAGGFGGFEDIFSSFFGGGGSSRNPNAPRQGDDLQYRVNLTFEEAIFGTEKEVKYHREAGCRTCNGSGAKPGTSPVTCGRCHGAGVINVDTQTPLGMMRRQVTCDVCHGRGKEIKYPCTTCHGTGHEKQAHSVHVKIPAGVETGQQIRLAGQGEAGFNGGPYGDLYVVVSVEASDKFEREGTTIFYNLNLNFVQAALGDTVDIPTVHGDVELVIPEGTQTGKKFRLRSKGAPSLRGGAVGDQYVTVNVVTPTGLNDRQKVALKEFAAAGDLKVNPKKKGFFDHIKDAFDGE

SEQ ID NO: 62 - protein, 453 aa, Streptococcus pneumoniae
MNPNLFRSVEFYQRRYHNYATVLIIPLSLLFTFILIFSLVATKEITVTSQGEIAPTSVIASIQSTSDNPILANHLVANQVVEKGDLLIKYSETMEESQKTALATQLQRLEKQKEGLGILKQSLEKATDLFSGEDEFGYHNTFMNFTKQSHDIELGITKTNTEVSNQANLSNSSSSAIEQEITKVQQQIGEYQELRDAIINNRARLPTGNPHQSILNRYLVASQGQTQGTAEEPFLSQINQSIAGLESSIASLKIQQAGIGSVATYDNSLATKIEVLRTQFLQTASQQQLTVENQLTELKVQLDQATQRLENNTLTSPSKGIVHLNSEFEGKNRIPTGTEIAQIFPVITDTREVLITYYVSSDYLPLLDKGQTVRLKLEKIGNHGTTIIGQLQTIDQTPTRTEQGNLFKLTALAKLSNEDSKLIQYGLQGRVTSVTTKKTYFDYFKDKILTHSD

SEQ ID NO: 63 - protein, 131 aa, Streptococcus pneumoniae
MSKKLNRKKQLRNGLRRAGAFSSTVTKVVDETKKVVKRAEQSASAAGKAVSKKVEQAVEATKEQAQKVANSVEDFAANLGGLPLDRAKTFYDEGIKSASDFKNWTEKELLALKGIGPATIKKLKENGIKFK

SEQ ID NO: 64 - protein, 254 aa, Streptococcus pneumoniae
LISLFGLAAAKPVQADTSIADIQKRGELVVGVKQDVPNFGYKDPKTGTYSGIETDLAKMVADELKVKIRYVPVTAQTRGPLLDNEQVDMDIATFTITDERKKLYNFTSPYYTDASGFLVNKSAKIKKIEDLNGKTIGVAQGSITQRLITELGKKKGLKFKFVELGSYPELITSLHAHRIDTFSVDRSILSGYTSKRTALLDDSFKPSDYGIVTKKSNTELNDYLDNLVTKWSKDGSLQKLYDRYKLKPSSHTAD

SEQ ID NO: 65 - protein, 553 aa, Streptococcus pneumoniae
MSNISLTTLGGVRENGKNMYIAEIGESIFVLNVGLKYPENEQLGVDVVIPNMDYLFENSDRIAGVFLTHGHADAIGALPYLLAEAKVPVFGSELTIELAKLFVKGNDAVKKFNDFHVIDENTEIDFGGTVVSFFPTTYSVPESLGIVLKTSEGSIVYTGDFKFDQTASESYATDFARLAEIGRDGVLALLSDSANADSNIQVASESEVRDEITQTIADWEGRIIVAAVSSNLSRIQQIFDAADKTGRRIVLTGFDIENIVRTAIRLKKLSLANEILLIKPKDMSRFEDHELIILETGRMGEPINGLRKMSIGRHRYVEIKDGDLVYIATAPSIAKEAFVARVENMIYQAGGVVKLITQSLHVSGHGNVRDLQLMINLLQPKYLFPVQGEYRELDAHAKAAMAVGMLPERIFIPKKGTTMAYENGDFVPAGSVSAGDILIDGNAIGDVGNVVLRDRKVLSEDGIFIVAITVNRREKKIVARARVHTRGFVYLKKSRDILRESSELINQTVEEYLQGDDFDWADLKGKVRDNLTKYLFDQTKRRPAILPVVMEAK

SEQ ID NO: 66 - protein, 2233 aa, Streptococcus pneumoniae
MGKGHWNRKRVYSIRKFAVGACSVMIGTCAVLLGGNIAGESVVYADETLITHTAEKPKEEKMIVEEKADKALETKNIVERTEQSEPSSTEAIASEKKEDEAVTPKEEKVSAKPEEKAPRIESQASNQEKPLKEDAKAVTNEEVNQMIEDRKVDFNQNWYFKLNANSKEAIKPDADVSTWKKLDLPYDWSIFNDFDHESPAQNEGGQLNGGEAWYRKTFKLDEKDLKKNVRLTFDGVYMDSQVYVNGQLVGHYPNGYNQFSYDITKYLQKDGRENVIAVHAVNKQPSSRWYSGSGIYRDVTLQVTDKVHVEKNGTTILTPKLEEQQHGKVETHVTSKIVNTDDKDHELVAEYQIVERGGHAVTGLVRTASRTLKAHESTSLDAILEVERPKLWTVLNDKPALYELITRVYRDGQLVDAKKDLFGYRYYHWTPNEGFSLNGERIKFHGVSLHHDHGALGAEENYKAEYRRLKQMKEMGVNSIRTTHNPASEQTLQIAAELGLLVQEEAFDTWYGGKKPYDYGRFFEKDATHPEARKGEKWSDFDLRTMVERGKNNPAIFMWSIGNEIGEANGDAHSLATVKRLVKVIKDVDKTRYVTMGADKFRFGNGSGGHEKIADELDAVGFNYSEDNYKALRAKHPKWLIYGSETSSATRTRGSYYRPERELKHSNGPERNYEQSDYGNDRVGWGKTATASWTFDRDNAGYAGQFIWTGTDYIGEPTPWHNQNQTPVKSSYFGIVDTAGIPKHDFYLYQSQWVSVKKKPMVHLLPHWNWENKELASKVADSEGKIPVRAYSNASSVELFLNGKSLGLKTFNKKQTSDGRTYQEGANANELYLEWKVAYQPGTLEAIARDESGKEIARDKITTAGKPAAVRLIKEDHAIAADGKDLTYIYYEIVDSQGNVVPTANNLVRFQLHGQGQLVGVDNGEQASRERYKAQADGSWIRKAFNGKGVAIVKSTEQAGKFTLTAHSDLLKSNQVTVFTGKKEGQEKTVLGTEVPKVQTIIGEAPEMPTTVPFVYSDGSRAERPVTWSSVDVSKPGIVTVKGMADGREVEARVEVIALKSELPVVKRIAPNTDLNSVDKSVSYVLIDGSVEEYEVDKWEIAEEDKAKLAIPGSRIQATGYLEGQPIHATLVVEEGNPAAPAVPTVTVGGEAVTGLTSQKPMQYRTLAYGAKLPEVTASAKNAAVTVLQASAANGMRASIFIQPKDGGPLQTYAIQFLEEAPKIAHLSLQVEKADSLKEDQTVKLSVRAHYQDGTQAVLPADKVTFSTSGEGEVAIRKGMLELHKPGAVTLNAEYEGAKDQVELTIQANTEKKIAQSIRPVNVVTDLHQEPSLPATVTVEYDKGFPKTHKVTWQAIPKEKLDSYQTFEVLGKVEGIDLEARAKVSVEGIVSVEEVSVTTPIAEAPQLPESVRTYDSNGHVSSAKVAWDAIRPEQYAKEGVFTVNGRLEGTQLTTKLHVRVSAQTEQGANISDQWTGSELPLAFASDSNPSDPVSNVNDKLISYNNQPANRWTNWNRTNPEASVGVLFGDSGILSKRSVDNLSVGFHEDHGVGVPKSYVIEYYVGKTVPTAPKNPSFVGNEDHVFNDSANWKPVTNLKAPAQLKAGEMNHFSFDKVETYAVRIRMVKADNKRGTSITEVQIFAKQVAAAKQGQTRIQVDGKDLANFNPDLTDYYLESVDGKVPAVTASVSNNGLATVVPSVREGEPVRVIAKAENGDILGEYRLHFTKDKSLLSHKPVAAVKQARLLQVGQALELPTKVPVYFTGKDGYETKDLTVEWEEVPAENLTKAGQFTVRGRVLGSNLVAEITVRVTDKLGETLSDNPNYDENSNQAFASATNDIDKNSHDRVDYLNDGDHSENRRWTNWSPTPSSNPEVSAGVIFRENGKIVERTVTQGKVQFFADSGTDAPSKLVLERYVGPEFEVPTYYSNYQAYDADHPFNNPENWEAVPYRADKDIAAGDEINVTFKAIKAKAMRWRMERKADKSGVAMIEMTFLAPSELPQESTQSKILVDGKELADFAENRQDYQITYKGQRPKVSVEENNQVASTVVDSGEDSFPVLVRLVSESGKQVKEYRIHLTKEKPVSEKTVAAVQEDLPKIEFVEKDLAYKTVEKKDSTLYLGETRVEQEGKVGKERIFTAINPDGSKEEKLREVVEVPTDRIVLVGTKPVAQEAKKPQVSEKADTKPIDSSEASQTNKAQLPSTGSAASQAAVAAGLTLLGLSAGLVVTKGKKED

SEQ ID NO: 67 - protein, 332 aa, Streptococcus pneumoniae
MNKRLFSKMSLVTLPILALFSQSVLAEENIHFSSCKEAWANGYSDIHEGEPGYSAKLDRDHDGVACELKNAPKGAFKAKQSTAIQINTSSATTSGWVKQDGAWYYFDGNGNLVKNAWQGSYYLKADGKMAQSEWIYDSSYQAWYYLKSDGSYAKNAWQGAYYLKSNGKMAQGEWVYDSSYQAWYYLKSDGSYARNAWQGNYYLKSDGKMAKGEWVYDATYQAWYYLTSDGSYAYSTWQGNYYLKSDGKMAVNEWVDGGRYYVGADGVWKEVQASTASSSNDSNSEYSAALGKAKSYNSLFHMSKKRMYRQLTSDFDKFSNDAAQYAIDHLDD

SEQ ID NO: 68 - protein, 450 aa, Streptococcus pneumoniae
MKVIDQFKNKKVLVLGLAKSGESAARLLDKLGAIVTVNDGKPFEDNPAAQSLLEEGIKVITGGHPLELLDEEFALMVKNPGIPYNNPMIEKALAKGIPVLTEVELAYLISEAPIIGITGSNGKTTTTTMIGEVLTAAGQHGLLSGNIGYPASQVAQIASDKDTLVMELSSFQLMGVQEFHPEIAVITNLMPTHIDYHGSFSEYVAAKWNIQNKMTAADFLVLNFNQDLAKDLTSKTEATVVPFSTLEKVDGAYLEDGQLYFRGEVVMAANEIGVPGSHNVENALATIAVAKLRDVDNQTIKETLSAFGGVKHRLQFVDDIKGVKFYNDSKSTNILATQKALSGFDNSKVVLIAGGLDRGNEFDELVPDITGLKKMVILGQSAERVKRAADKAGVAYVEATDIADATRKAYELATQGDVVLLSPANASWDMYANFEVRGDLFIDTVAELKE

SEQ ID NO: 69 - protein, 386 aa, Streptococcus pneumoniae
MKKKFALSFVALASVALLAACGEVKSGAVNTAGNSVEEKTIKIGFNFEESGSLAAYGTAEQKGAQLAVDEINAAGGIDGKQIEVVDKDNKSETAEAASVTTNLVTQSKVSAVVGPATSGATAAAVANATKAGVPLISPSATQDGLTKGQDYLFIGTFQDSFQGKIISNYVSEKLNAKKVVLYTDNASDYAKGIAKSFRESYKGEIVADETFVAGDTDFQAALTKMKGKDFDAIVVPGYYNEAGKIVNQARGMGIDKPIVGGDGFNGEEFVQQATAEKASNIYFISGFSTTVEVSAKAKAFLDAYRAKYNEEPSTFAALAYDSVHLVANAAKGAKNSGEIKNNLAKTKDFEGVTGQTSFDADHNTVKTAYMMTMNNGKVEAAEVVKP

SEQ ID NO: 70 - protein, 513 aa, Streptococcus pneumoniae
MSILEVKNLSHGFGDRAIFEDVSFRLLKGEHIGLVGANGEGKSTFMSIVTGKMLPDEGKVEWSKYVTAGYLDQHSVLAERQSVRDVLRTAFDELFKAEARINDLYMKMAEDGADVDALMEEVGELQDRLESRDFYTLDAKIDEVARALGVMDFGMDTDVTSLSGGQRTKVLLAKLLLEKPDILLLDEPTNYLDAEHIDWLKRYLQNYENAFVLISHDIPFLNDVINIVYHVENQQLTRYSGDYYQFQEVYAMKKSQLEAAYERQQKEIADLKDFVARNKARVATRNMAMSRQKKLDKMDIIELQSEKPKPSFDFKPARTPGRFIFQAKNLQIGYDRPLTKPLNLTFERNQKVAIIGANGIGKTTLLKSLLGIISPIAGEVERGDYLELGYFEQEVEGGNRQTPLEAVWNAFPALNQAEVRAALARCGLTTKHIESQIQVLSGGEQAKVRFCLLMNRENNVLVLDEPTNHLDVDAKDELKRALKEYRGSILMVCHEPDFYEGWIDQIWDFNNLT

SEQ ID NO: 71 - protein, 399 aa, Streptococcus pneumoniae
MKKKNGKAKKWQLYAAIGAASVVVLGAGGILLFRQPSQTALKDEPTHLVVAKEGSVASSVLLSGTVTAKNEQYVYFDASKGDLDEILVSVGDKVSEGQALVKYSSSEAQAAYDSASRAVARADRHINELNQARNEAASAPAPQLPAPVGGEDATVQSPTPVAGNSVASIDAQLGDARDARADAAAQLSKAQSQLDATTVLSTLEGTVVEVNSNVSKSPTGASQVMVHIVSNENLQVKGELSEYNLANLSVGQEVSFTSKVYPDKKWTGKLSYISDYPKNNGEAASPAAGNNTGSKYPYTIDVTGEVGDLKQGFSVNIEVKSKTKAILVPVSSLVMDDSKNYVWIVDEQQKAKKVEVSLGNADAENQEITSGLTNGAKVISNPTSSLEEGKEVKADEATN

SEQ ID NO: 72 - protein, 230 aa, Streptococcus pneumoniae
SETNHEIDSNFAGRLNILRAGVLDANDGIISIAGVVIGVASATTNIWIIFLSGFTAILAGAFSMAGGEYVSVSTPKDTEEAAVSREKLLLDQDRELAKKSLYAAYIQNGEFKTSAQLLTNKIFLKNPLKALVEEKYGIEYEEFTNPWHAAISSFVAFFLRSLPPMLSVTIFPSDYRIPATVLIVGVALLLTGYTSARLGKAPTKTAMIRNLAIGLLTMGVTFLLGQLFSI

SEQ ID NO: 73 - protein, 627 aa, Streptococcus pneumoniae
MKKKLTSLALVGAFLGLSWYGNVQAQESSGNKIHFINVQEGGSDAIILESNGHFAMVDTGEDYDFPDGSDSRYPWREGIETSYKHVLTDRVFRRLKELGVQKLDFILVTHTHSDHIGNVDELLSTYPVDRVYLKKYSDSRITNSERLWDNLYGYDKVLQTAAEKGVSVIQNITQGDAHFQFGDMDIQLYNYENETDSSGELKKIWDDNSNSLISVVKVNGKKIYLGGDLDNVHGAEDKYGPLIGKVDLMKFNHHHDTNKSNTKDFIKNLSPSLIVQTSDSLPWKNGVDSEYVNWLKERGIERINAASKDYDATVFDIRKDGFVNISTSYKPIPSFQAGWHKSAYGNWWYQAPDSTGEYAVGWNEIEGEWYYFNQTGILLQNQWKKWNNHWFYLTDSGASAKNWKKIAGIWYYFNKENQMEIGWIQDKEQWYYLDVDGSMKTGWLQYMGQWYYFAPSGEMKMGWVKDKETWYYMDSTGVMKTGEIEVAGQHYYLEDSGAMKQGWHKKANDWYFYKTDGSRAVGWIKDKDKWYFLKENGQLLVNGKTPEGYTVDSSGAWLVDVSIEKSATIKTTSHSEIKESKEVVKKDLENKETSQHESVTNFSTSQDLTSSTSQSSETSVNKSESEQ

SEQ ID NO: 74 - protein, 456 aa, Streptococcus pneumoniae
MDLGPTQRGISVVSQSYINVIGAGLAGSEAAYQIAERGIPVKLYEMRGVKSTPQHKTDNFAELVCSNSLRGDALTNAVGLLKEEMRRLGSVILESAEATRVPAGGALAVDRDGFSQMVTEKVANHPLIEVVRDEITELPTDVITVIATGPLTSDALAEKIHALNDGAGFYFYDAAAPIIDVNTIDMSKVYLKSRYDKGEAAYLNAPMTKQEFMDFHEALVNAEEAPLSSFEKEKYFEGCMPIEVMAKRGIKTMLYGPMKPVGLEYPDDYTGPRDGEFKTPYAVVQLRQDNAAGSLYNIVGFQTHLKWGEQKRVFQMIPGLENAEFVRYGVMHRNSYMDSPNLLEQTYRSKKQPNLFFAGQMTGVEGYVESAASGLVAGINAARLFKEESEAIFPETTAIGSLAHYITHADSKHFQPMNVNFGIIKELEGERIRDKKARYEKIAERALADLEEFLTV

SEQ ID NO: 75 - protein, 360 aa, Streptococcus pneumoniae
MLIGIPKEIKNNENRVALTPAGVHSLVSRGHRVLIETNAGLGSGFTDADYQKQGAEIVATAGEAWAAELVVKVKESLSSEYGYLRDDLLLFTYLHMAAAPELADAMLTAKTTETVRDNQGQLPLLVPMSEVAGRMAVQIGAHFLTKQAGGSGVLLGGVPGVPKGKVTIIGGGVVGTHAARIALGLGAQVTILDISSKRLSVLEEVFGSQIQTLMSNSFNIEASVRDADVVIGAILIPGAKAPELVTDEMVKQMRPGSVSLTLLLTKVALSKQLTVQRTMNPSMKNTVFSTMPLPISLVRLLALQPSPPMSLFLISKLWLAKDSHKQSLKMKACVKVLLIKVTLTYQLLKDLIVTTLISMI

SEQ ID NO: 76 - protein, 477 aa, Streptococcus pneumoniae
MKILFVAAEGAPFSKTGGLGDVIGALPKSLVKAGHEVAVILPYYDMVEAKFGNQIEDVLHFEVSVGWRRQYCGIKKTVLNGVTFYFIDNQYYFFRGHVYGDFDDGERFAFFQLAAIEAMERIDFIPDLLHVHDYHTAMIPFLLKEKYRWIQAYEDIETVLTIHNLEFQGQFSEGMLGDLFGVGFERYADGTLRWNNCLNWMKAGILYANRVSTVSPSYAHEIMTSQFGCNLDQILKMESGKVSGIVNGIDADLYNPQTDALLDYHFNQEDLSGKAKNKAKLQERVGLPVRADVPLVGIVSRLTRQKGFDVVVESLHHILQEDVQIVLLGTGDPAFEGAFSWFAQIYPDKLSTNITFDVKLAQEIYAACDLFLMPSRFEPCGLSQMMAMRYGTLPLVHEVGGLRDTVRAFNPIEGSGTGFSFDNLSPYWLNWTFQTALDLYRNHPDIWRNLQKQAMESDFSWDTACKSYLDLYHSLVN

SEQ ID NO: 77 - protein, 2004 aa, Streptococcus pneumoniae
MEKYFGEKQERFSFRKLSVGLVSATISSLFFMSVLASSSVDAQETAGVHYKYVADSELSSEEKKQLVYDIPTYVENDDETYYLVYKLNSQNQLAELPNTGSKNERQALVAGASLAAMGILIFAVSKKKVKNKTVLHLVLVAGIGNGVLVSVHALENHLLLNYNTDYELTSGEKLPLPKEISGYTYIGYIKEGKTTSESEVSNQKSSVATPTKQQKVDYNVTPNFVDHPSTVQAIQEQTPVSSTKPTEVQVVEKPFSTELINPRKEEKQSSDSQEQLAEHKNLETKKEEKISPKEKTGVNTLNPQDEVLSGQLNKPELLYREETMETKIDFQEEIQENPDLAEGTVRVKQEGKLGKKVEIVRIFSVNKEEVSREIVSTSTTAPSPRIVEKGTKKTQVIKEQPETGVEHKDVQSGAIVEPAIQPELPEAVVSDKGEPEVQPTLPEAVVTDKGETEVQPESPDTVVSDKGEPEQVAPLPEYKGNIEQVKPETPVEKTKEQGPEKTEEVPVKPTEETPVNPNEGTTEGTSIQEAENPVQPAEESTTNSEKVSPDTSSKNTGEVSSNPSDSTTSVGESNKPEHNDSKNENSEKTVEEVPVNPNEGTVEGTSNQETEKPVQPAEETQTNSGKIANENTGEVSNKPSDSKPPVEESNQPEKNGTATKPENSGNTTSENGQTEPEPSNGNSTEDVSTESNTSNSNGNEEIKQENELDPDKKVEEPEKTLELRNVSDLELYSLSNGTYKQHISLEQVPSNPNSYFVKVKSSSFKDVYLPVASISEERKNDKILYKITAKVEKLQQEIESRYKDNFTFYLAKKGTEETTNFTSFSNLVKAINQNPSGTYHLAASLNANEVELGPDERSYIKDTFTGRLIGEKDGKNYAIYNLKKPLFENLSGATVEKLSLKNVAISGKDDIGSLANEAQNNTKIKQVHVDGVLAGERGIGGLLAKAEQSSITESSFKGRIINTYETTAAYNIGGMVGHLTGDKALLTKSKATVAISSNTNTSDQTVGGLAGLVDRDAQIQDSYAEGDINNVKHFGRVAGVAGNLWDRTSGDVRHAGSLTNVLSDVNVTNGNAITGYHYNEMKVKDTFSSKANRVYNVTLVKDEVVSKESFEERGTMLDASQIASKKAEINPLILPTVEPLSTSGKKDSDFSKVAYYQAKRNLTYKNIEKLLPFYNKATIVKYGNLVNENSLLYQKELLSAVMMKDNQVITDIVSNKQTANKLLLHYKDDLSEKLDLKYQNDFAKLAEYSLGNTGLLYTPNQFLYDQTSIIKQVLPDLQKVDYHSEAIRKTLGISPNVKQTELYLEDQFAKTKQQLEDSLKKLLSADAGLASANPVTEGYLVDKIKRNKEALLLGLTYLERWYNFSYGQVNVKDLVLYHLDFFGKGNASPLDTLIELGKSGFNNLLAKNNVDTYGISLASQHGTTDLFSTLEHYRKVFLPNTSNNDWFKSETKAYIVEEKSTIEEVKTKQGLAGTKYSIGVYDRITSATWKYRNMVLPLLTLPERSVFVISTMSSLGFGAYDRYRSSDHKAGKALNDFVEENARETAKRQRDHYDYWYRILDDNAREKLYRNILLYDAYKFGDDNTVGKATEVADFDNPNPAMQHFFGPVGNKVGHNQHGAYATGDAVYYMGYRMLDKDGAITYTHEMTHDSDQDIYLGGYGRRSGLGPEFFAKGLLQAPDHPDDATITINSILKHSKSDSTESRRLQVLDPTTRFNNADDLKQYVHNMFDVVYMLEYLEGNSILKLDTNQKQQLLRKVTNEYHPDPDGNKVYATNVVRNLTVEEVERLRSFNDLIDNNILSSREYASGKYERNGYFTIKLFAPIYAALSNDIGTPGDLMGRRIAYELLAAKGFKDGMVPYISNQYEEEAKQKGKTINLYGKTRGLVTDDLVLEKVFNNQYHTWSEFKKAMYQERQDQFDRLNKVTFNDTTQPWQTFAKKTTSSVDELQKLMDVAVRKDAEHNYYHWNNYNPDIDSEVHKLKRAIFKAYLDQTNDFRSSIFENKK

SEQ ID NO: 78 - protein, 1084 aa, Streptococcus pneumoniae
MPVEIKTTKEIHPKIYAYTTPTVTSNEGWIKIGYTERDVTQRIKEQTHTAHIATDVLWTGDAAYTEEPDKGKTFKDHDFHHFLSFHDVERRPKTEWFYFNGTPEKSKNLFDKFVQHDLSGYQPGKGQDYTLRQEQEEAVAKTLAYFQEHAGGKFLWNAKPRFGKTLSTYDLARRMEAVNVLIVTNRPAIANSWYDDFETFIAGQTTYKFVSESDSLKSRPILSRQEFLGILADDVRQLAFISLQDLKGSVYLGGEHDKLKWVTDLHWDLLVIDEAHEGVDTFKTDQAFNKIRRNFTLHLSGTSFKALAKGDFTEEQIYNWSYADEQAAKYSWSLEQEEENPYESLPQLNLFTYQMSQMIGEKLEKGAQIDGENIDYVFDLSEFFATDDKGKFIHEHDVRNWLDTLSSNEKYPFSTKELRNELKHTFWLLERVASAKALKALLEEHPIYENYEIVLAAGDGRMSEEDDKVKLKSLDLVRKAIAENDKTITLSVGQLTTGVTIPEWTGVLMLSNLKSPALYMQAAFRAQNPYSWSDNKGNHFRKERAYVFDFAPERTLILFDEFANNLLLVTAAGRGTSATREENIRELLNFFPIIAEDRAGKMVEIDAKAVLTTPRQIKAREVLKRGFMSNLLFDNISGIFQASQTVLDILNELPVEKEGKVQDSSDLLDFSDVTVDDEGNAVVDHEIVVNQQMRLFGEKVYGLGESVAELVTKDEERTQKQLVNDLSKTVSSVIVEELKADYSLKTRETEQIKKQITATLENEIRKNDIERKISEAHIKQELQQQLKEANDKAQKDKIQEDLEKRLEENKLIHKEKLEQTLKKEVEKMPEKFIEQVEIKRVEQLKQSAQDEIRDHLRGFARTIPSFIMAYGDQTLTLDNFDAFVPEHVFYEVTGITIDQFRYLRDGGQDFAGHLFDKATFDEAIQEFLRKKKELADYFKDQKEDIFDYIPPQKTNQIFTPKRVVKRMVDDLEKENPGIFDDPSKTFIDLYMKSGLYIAELVKRLYNSNGLKEAFPNPEERLKHILEKQVYGFAPSEIIYNISTNFIFGNLSKDISRKNFVLADTIPAAKEGSIQKLVDSYFENN

SEQ ID NO: 79 - protein, 234 aa, Streptococcus pneumoniae
MKKILIVDDEKPISDIIKFNMTKEGYEVVTAFNGREALEQFEAEQPDIIILDLMLPEIDGLEVAKTIRKTSSVPILMLSAKDSEFDKVIGLELGADDYVTKPFSNRELQARVKALLRRSQPMPVDGQEADSKPQPIQIGDLEIVPDAYVAKKYGEELDLTHREFELLYHLASHTGQVITREHLLETVWGYDYFGDVRTVDVTVRRLREKIEDTPSRPEYILTRRGVGYYMRNNA

SEQ ID NO: 80 - protein, 721 aa, Streptococcus pneumoniae
MKKKFLAFLLILFPIFSLGIAKAETIKIVSDTAYAPFEFKDSDQTYKGIDVDIINKVAEIKGWNIQMSYPGFDAAVNAVQAGQADAIMAGMTKTKEREKVFTMSDTYYDTKVVIATTKSHKISKYDQLTGKTVGVKNGTAAQRFLETIKDKYGFTIKTFDTGDLMNNSLSAGAIDAMMDDKPVIEYAINQGQDLHIEMDGEAVGSFAFGVKKGSKYEHLVTEFNQALSEMKKDGSLDKIIKKWTASSSSAVPTTTTLAGLKAIPVKAKYIIASDSSFAPFVFQNSSNQYTGIDMELIKAIAKDQGFEIEITNPGFDAAISAVQAGQADGIIAGMSVTDARKATFDFSESYYTANTILGVKESSNIASYEDLKGKTVGVKNGTASQTFLTENQSKYGYKIKTFADGSSMYDSLNTGAIDAVMDDEPVLKYSISQGQKLKTPISGTPIGETAFAVKKGANPELIEMFNNGLANLKANGEFQKILDKYLASESSTASTSTVDETTLWGLLQNNYKQLLSGLGITLALALISFAIAIVIGIIFGMFSVSPYKSLRVISEIFVDVIRGIPLMILAAFIFWGIPNFIESITGQQSPINDFVAGTIALSLNAAAYIAEIVRGGIQAVPVGQMEASRSLGISYGKTMRKIILPQATKLMLPNFVNQFVIALKDTTIVSAIGLVELFQTGKIIIARNYQSFKMYAILAIFYLVIITLLTRLAKRLEKRIR

SEQ ID NO: 81 - protein, 523 aa, Streptococcus pneumoniae
MAFESLTERLQNVFKNLRKKGKISESDVQEATKEIRLALLEADVALPVVKDFIKKVRERAVGHEVIDTLNPAQQIIKIVDEELTAVLGSDTAEIIKSPKIPTIIMMVGLQGAGKTTFAGKLANKLKKEENARPLMIAADIYRPAAIDQLKTLGQQIDVPVFALGTEVPAVEIVRQGLEQAQTNHNDYVLIDTAGRLQIDELLMNELRDVKALAQPNEILLVVDAMIGQEAANVAREFNAQLEVTGVILTKIDGDTRGGAALSVRHITGKPIKFTGTGEKITDIETFHPDRMSSRILGMGDMLTLIEKASQEYDEQKALEMAEKMRENTFDFNDFIDQLDQVQNMGPMEDLLKMIPGMANNPALQNMKVDERQIARKRAIVSSMTPEERENPDLLNPSRRRRIAAGSGNTFVEVNKFIKDFNQAKQLMQGVMSGDMNKMMKQMGINPNNLPKNMPNMGGMDMSALEGMMGQGGMPDLSALGGAGMPDMSQMFGGGLKGKIGEFAMKQSMKRMANKMKKAKKKRK

SEQ ID NO: 82 - protein, 233 aa, Streptococcus pneumoniae
MSQIWTKEKFISQVQGGVIVSCQALPGEALYNEEFSLMPFMAKAALEAGAVGIRANSVRDIKAIQKVVDLPIIGIIKRDYPPQEPYITATMKEVDELVECGTTVIAFDATLRPRYDGLVVSEFIKKIKEKYPNQLLMADVSNLDEGLYAFKSGVDFVGTTLSGYTSTSVQSDEPDFELMKKLADFNIPVIAEGKIHYPEQLKKAYSLGVTSVVIGGAITRPKEIAQRFINVIK

SEQ ID NO: 83 - protein, 388 aa, Streptococcus pneumoniae
MRYLTAGESHGPRLTAIIEGIPAGLPLTAEDINEDLRRRQGGYGRGGRMKIENDQVVFTSGVRHGKTTGAPITMDVINKDHQKWLDIMSAEDIEDRLKSKRKITHPRPGHADLVGGIKYRFDDLRNSLERSSARETTMRVAVGAVAKRLLAELDMEIANHVVVFGGKEIDVPENLTVAEIKQRAAQSEVSIVNQEREQEIKDYIDQIKRDGDTIGGVVETVVGGVPVGLGSYVQWDRKLDARLAQAVVSINAFKGVEFGLGFEAGYRKGSQVMDEILWSKEDGYTRRTNNLGGFEGGMTNGQPIVVRGVMKPIPTLYKPLMSVDIETHEPYKATVERSDPTALPAAGMVMEAVVATVLAQEILEKFSSDNLEELKEAVAKHRDYTKNY

SEQ ID NO: 84 - protein, 390 aa, Streptococcus pneumoniae
MVVMNRIRVSKRVEKKLAKGLVLLEASDLENVNLKDQEVEVQGQEGNFLGTAYLSQQNKGLGWFISKDKVAFNQAFFETLFRKAKEKRNAYYQDDLTTAFRLFNQEGDGFGGLTVDLYGDYAVFSWYNSYVYQIRQTISEAFRQVFPEVLGAYEKIRFKGLDYESAHVYGQEAPDFFNVLENGVLYQVFMNDGLMTGIFLDQHEVRGSLVDGLAMGKSLLNMFSYTAAFSVAAAMGGASHTTSVDLAKRSRELSQAHFQANGLSTDEHRFIVMDVFEYFKYAKRKDLTYDVIVLDPPSFARNKKQTFSVAKDYHKLISQSLEILNPGGIIIASTNAANVSRQKFTEQIDKGFAGRSYQILNKYGLPADFAYNKKDESSNYLKVISMKVSK

SEQ ID NO: 85 - protein, 428 aa, Streptococcus pneumoniae
MTKTLKRPEVLSPAGTLEKLKVAVQYGADAVFIGGQAYGLRSRAGNFTFEQMEEGVQFAAKYGAKVYVAANMVMHEGNEAGAGEWFRKLRDIGIAAVIVSDPALIMIAVTEAPGLEIHLSTQASATNYETLEFWKELGLTRVVLAREVSMEELAEIRKRTDVEIEAFVHGAMCISYSGRCTLSNHMSMRDANRGGCSQSCRWKYDLYDMPFGKERKSLQGEIPEEFSMSAVDMSMIDHIPDMIENGVDSLKIEGRMKSIHYVSTVTNCYKAAVDAYLESPEKFEAIKQDLVDEMWKVAQRELATGFYYGTPSENEQLFGARRKIPEYKFVAEVVSYDDAAQTATIRQRNVINEGDQVEFYGPGFRHFETYIEDLHDAKGNKIDRAPNPMELLTIKVPQPVQSGDMVRALKEGLINLYKEDGTSVTVRA

SEQ ID NO: 86 - protein, 280 aa, Streptococcus pneumoniae
MNTYQLNNGVEIPVLGFGTFKAKDGEEAYRAVLEALKAGYRHIDTAAIYQNEESVGQAIKDSGVPREEMFVTTKLWNSQQTYEQTRQALEKSIEKLGLDYLDLYLIHWPNPKPLRENDAWKTRNAEVWRAMEDLYQEGKIRAIGVSNFLPHHLDALLETATIVPAVNQVRLAPGVYQDQVVAYCREKGILLEAWGPFGQGELFDSKQVQEIAANHGKSVAQIALAWSLAEGFLPLPKSVTTSRIQANLDCFGIELSHEERETLKTIAVQSGAPRVDDVDF

SEQ ID NO: 87 - protein, 551 aa, Streptococcus pneumoniae
LSEKSREEEKLSFKEQILRDLEKVKGYDEVLKEDEAVVRTPANEPSTEELMADSLSTVEEIMRKAPTVPTHPSQGVPASPADEIQRETPGVPSHPSQDVPSSPAEESGSRPGPGPVRPKKLEREYNETPTRVAVSYTTAEKKAEQAGPETPTPATETVDIIRDTSRRSRREGAKPVKPKKEKKSHVKAFVISFLVFLALLSAGGYFGYQYVLDSLLPIDANSKKYVTVGIPEGSNVQEIGTTLEKAGLVKHGLIFSFYAKYKNYTDLKAGYYNLQKSMSTEDLLKELQKGGTDEPQEPVLATLTIPEGYTLDQIAQAVGQLQGDFKESLTAEAFLAKVQDETFISQAVAKYPTLLESLPVKDSGARYRLEGYLFPATYSIKESTTIESLIDEMLAAMDKNLSPYYSTIKSKNLTVNELLTIASLVEKEGAKTEDRKLIAGVFYNRLNRDMPLQSNIAILYAQGKLGQNISLAEDVAIDTNIDSPYNVYKNVGLMPGPVDSPSLDAIESSINQTKSDNLYFVADVTEGKVYYANNQEDHDRNVAEHVNSKLN

SEQ ID NO: 88 - protein, 205 aa, Streptococcus pneumoniae
MKQERFPLVSDDEVMLTEMPVMNLYDESDLISNIKGEYRDKNYLEWAPIAEEKPVKPIEKQVEKPKKAPLGVKKEGKSYAEVAREEARADLKKKRSANYLTQDFSLARRHSQPSLVRQGNQPTAPFQKENPGEFVKYSQKLTQSHYILAEEVHSIPTKNEEVSAPAPKKNNYDFLKKSQIYNKKSKQTEQERRVAQELNLTRMTE

SEQ ID NO: 89 - protein, 652 aa, Streptococcus pneumoniae
MKKSKSKYLTLAGLVLGTGVLLSACGNSSTASKTYNYVYSSDPSSLNYLAENRAATSDIVANLVDGLLENDQYGNIIPSLAEDWTVSQDGLTYTYKLRKDAKWFTSEGEEYAPVTAQDFVTGLQYAADKKSEALYLVQDSVAGLDDYITGKTSDFSTVGVKALDDQTVQYTLVKPELYWNSKTLATILFPVNADFLKSKGDDFGKADPSSILYNGPFLMKALVSKSAIEYKKNPNYWDAKNVFVDDVKLTYYDGSDQESLERNFTAGAYTTARLFPNSSSYEGIKEKYKNNIIYSMQNSTSYFFNFNLDRKSYNYTSKTSDIEKKSTQEAVLNKNFRQAINFAFDRTSYGAQSEGKEGATKILRNLVVPPNFVSIKGKDFGEVVASKMVNYGKEWQGINFADGQDPYYNPEKAKAKFAEAKKELEAKGVQFPIHLDKTVEVTDKVGIQGVSSIKQSIESVLGSDNVVIDIQQLTSDEFDSSGYFAQTAAQKDYDLYHGGWGPDYQDPSTYLDIFNTNSGGFLQNLGLEPGEANDKAKAVGLDVYTQMLEEANKEQDPAKRYEKYADIQAWLIDSSLVLPSVSRGGTPSLRRTVPFAAAYGLTGTKGVESYKYLKVQDKIVTTDEYAKAREKWLKEKEESNKKAQEELAKHVK

SEQ ID NO: 90 - protein, 158 aa, Streptococcus pneumoniae
MAKEPWQEDIYDQEESRAERRHRNHGGADRMANRILTILASIFFVIVVVMVIVLIYLSSGGSNRTAALKGFHDSDASVVQISSSSSSQPEQSSEPESTSSSSEEAANPEGTIKVLAGEGEAAIAARAGISIAQLEALNPGHMATGSWFANPGDVIKIK

SEQ ID NO: 91 - protein, 262 aa, Streptococcus pneumoniae
MPITSLEIKDKTFGTRFRGFDPEEVDEFLDIVVRDYEDLVRANHDKNLRIKSLEERLSYFDEIKDSLSQSVLIAQDTAERVKQAAHERSNNIIHQAEQDAQRLLEEAKYKANEILRQATDNAKKVAVETEELKNKSRVFHQRLKSTIESQLAIVESSDWEDILRPTATYLQTSDEAFKEVVSEVLGEPIPAPIEEEPIDMTRQFSQAEMAELQARIEVADKELSEFEAQIKQEVEAPTPVVSPQVEEEPLLIQLAQCMKNQK

SEQ ID NO: 92 - protein, 179 aa, Streptococcus pneumoniae
MSLKDRFDRFIDYFTEDEDSSLPYEKRDEPVFTSVNSSQEPALPMNQPSQSAGTKENNITRLHARQQELANQSQRATDKVIIDVRYPRKYEDATEIVDLLAGNESILIDFQYMTEVQARRCLDYLDGACHVLAGNLKKVASTMYLLTPVNVIVNVEDIRLPDEDQQGEFGFDMKRNRVR

SEQ ID NO: 93 - protein, 305 aa, Streptococcus pneumoniae
MSDLKKYEGVIPAFYACYDDQGEVSPERTRALVQYFIDKGVQGLYVNGSSGECIYQSVEDRKLILEEVMAVAKGKLTIIAHVACNNTKDSMELARHAESLGVDAIATIPPIYFRLPEYSVAKYWNDISSAAPNTDYVIYNIPQLAGVALTPSLYTEMLKNPRVIGVKNSSMPVQDIQTFVSLGGEDHIVFNGPDEQFLGGRLMGARAGIGGTYGAMPELFLKLNQLIADKDLETARELQYAINAIIGKLTSAHGNMYGVIKEVLKINEGLNIGSVRSPLTPVTEEDRPVVEAAAALIRETKERFL

SEQ ID NO: 94 - protein, 659 aa, Streptococcus pneumoniae
MIQIGKIFAGRYRIVKQIGRGGMADVYLAKDLILDGEEVAVKVLRTNYQTDPIAVARFQREARAMADLDHPHIVRITDIGEEDGQQYLAMEYVAGLDLKRYIKEHYPLSNEEAVRIMGQILLAMRLAHTRGIVHRDLKPQNILLTPDGTAKVTDFGIAVAFAETSLTQTNSMLGSVHYLSPEQARGSKATVQSDIYAMGIIFYEMLTGHIPYDGDSAVTIALQHFQKPLPSVIAENPSVPQALENVIIKATAKKLTNRYRSVSEMYVDLSSSLSYNRRNESKLIFDETSKADTKTLPKVSQSTLTSIPKVQAQTEHKSIKNPSQAVTEETYQPQAPKKHRFKMRYLILLASLVLVAASLIWILSRTPATIAIPDVAGQTVAEAKATLKKANFEIGEEKTEASEKVEEGRIIRTDPGAGTGRKEGTKINLVVSSGKQSFQISNYVGRKSSDVIAELKEKKVPDNLIKIEEEESNESEAGTVLKQSLPEGTTYDLSKATQIVLTVAKKATTIQLGNYIGRNSTEVISELKQKKVPENLIKIEEEESSESEPGTIMKQSPGAGTTYDVSKPTQIVLTVAKKVTSVAMPSYIGSSLEFTKNNLIQIVGIKEANIEVVEVTTAPAGSAEGMVVEQSPRAGEKVDLNKTRVKISIYKPKTTSATP

SEQ ID NO: 95 - protein, 311 aa, Streptococcus pneumoniae
MTKLIFMGTPDFSATVLKGLLTDDRYEILAVVTQPDRAVGRKKVIQETPVKQAAKEAGLSIYQPEKLSGSPEMEDLMKLGADGIVTAAFGQFLPSKLLDSMDFAVNVHASLLPRHRGGAPIHYALIQGDEEAGVTIMEMVKEMDAGDMISRRSIPITDEDNVGTLFEKLALVGRDLLLDTLPAYIAGDIKPEPQDTSQVTFSPNIKPEEEKLDWNKTNRQLFNQIRGMNPWPVAHTFLKGDRFKIYEALPVEGQGNPGEILSIGKKELIVATAEGALSLKQVQPAGKPKMDIASFLNGVGRTLTVGERFGD

SEQ ID NO: 96 - protein, 790 aa, Streptococcus pneumoniae
VFRRLGQDFQLRKVKKILKQINALKGKMSSLSDQELVAKTVEFRQRLSEGESLDDILVEAFAVVREADKRILGMFPYDVQVMGAIVMHYGNVAEMNTGEGKTLTATMPVYLNAFSGEGVMVVTPNEYLSKRDAEEMGQVYRFLGLTIGVPFTEDPKKEMKAEEKKLIYASDIIYTTNSNLGFDYLNDNLASNEEGKFLRPFNYVIIDEIDDILLDSAQTPLIIAGSPRVQSNYYAIIDTLVTTLVEGEDYIFKEEKEEVWLTTKGAKSAENFLGIDNLYKEEHASFARHLVYAIRAHKLFTKDKDYIIRGNEMVLVDKGTGRLMEMTKLQGGLHQAIEAKEHVKLSPETRAMASITYQSLFKMFNKISGMTGTGKVAEKEFIETYNMSVVRIPTNRPRQRIDYPDNLYITLPEKVYASLEYIKQYHAKGNPLLVFVGSVEMSQLYSSLLFREGIAHNVLNANNAAREAQIISESGQMGAVTVATSMAGRGTDIKLGKGVAELGGLIVIGTERMESQRIDLQIRGRSGRQGDPGMSKFFVSLEDDVIKKFGPSWVHKKYKDYQVQDMTQPEVLKGRKYRKLVEKAQHASDSAGRSARRQTLEYAESMNIQRDIVYKERNRLIDGSRDLEDVVVDIIERYTEEVAADHYASRELLFHFIVTNISFHVKEVPDYIDVTDKTAVRSFMKQVIDKELSEKKELLNQHDLYEQFLRLSLLKAIDDNWVEQVDYLQQLSMAIGGQSASQKNPIVEYYQEAYAGFEAMKEQIHADMVRNLLMGLVEVTPKGEIVTHFP

SEQ ID NO: 97 - protein, 4776 aa, Streptococcus pneumoniae
MTETVEDKVSHSITGLDILKGIVAAGAVISGTVATQTKVFTNESAVLEKTVEKTDALATNDTVVLGTISTSNSASSTSLSASESASTSASESASTSASTSASTSASESASTSASTSISASSTVVGSQTAAATEATAKKVEEDRKKPASDYVASVTNVNLQSYAKRRKRSVDSIEQLLASIKNAAVFSGNTIVNGAPAINASLNIAKSETKVYTGEGVDSVYRVPIYYKLKVTNDGSKLTFTYTVTYVNPKTNDLGNISSMRPGYSIYNSGTSTQTMLTLGSDLGKPSGVKNYITDKNGRQVLSYNTSTMTTQGSGYTWGNGAQMNGFFAKKGYGLTSSWTVPITGTDTSFTFTPYAARTDRIGINYFNGGGKVVESSTTSQSLSQSKSLSVSASQSASASASTSASASASTSASASASTSASASASTSASVSASTSASASASTSASASASTSASESASTSASASASTSASASASTSASASASTSASESASTSASASASTSASESASTSASASASTSASASASTSASGSASTSTSASASTSASASASTSASASASISASESASTSASESASTSTSASASTSASESASTSASASASTSASASASTSASASASTSASASTSASESASTSASASASTSASASASTSASASASTSASASASTSASVSASTSASASASTSASASASTSASESASTSASASASTSASASASTSASASASTSASASASTSASASASTSASESASTSASASASTSASASASTSASASASTSASASASTSASASASISASESASTSASASASTSASASASTSASASASTSASESASTSASASASTSASASASTSASASASTSASASASTSASASASTSASASASTSASESASTSASASASTSASESASTSASASASTSASASASTSASASASTSASASASTSASASASTSASASASTSASASTSASESASTSASASASTSASASASTSASASASTSASESASTSASASASTSASASASTSASASASTSASASASTSASASASISASESASTSASASASTSASVSASTSASASASTSASESASTSASASASTSASESASTSASASASTSASASASISASESASTSASASASTSASASASTSASASASTSASESASTSTSASASTSASESASTSASASASTSASASASTSASASASTSASASASTSASASTSASESASTSASASASTSASASASTSASASASTSASASASTSASASASTSASASASTSASASASTSASASASTSASESASTSASASASTSASASASTSASASASTSASASASTSASVSASTSASESASTSASASASTSASASASTSASESASTSASASASTSASESASTSASASASTSASASASTSASASASTSASASASTSASASASTSASASASTSASASASTSASASASTSASASASTSASASASTSASASASTSASASASTSASASASISASESASTSASASASTSASASASTSASVSASTSASASASTSASASASISASESASTSASASASTSASASASTSASASASTSASASASISASESASTSASASASTSASASASTSASASASTSASASASTSASASASTSASASASTSASASASTSASASASTSASASASTSASESASTSASASASTSASASASTSASASASTSASVSASTSASESASTSASASASTSASASASTSASASASTSASESASTSASASASTSASASASTSASESASTSASASASTSASASASTSASASASTSASASASASTSASASASTSASASASTSASASASISASESASTSASESASTSTSASASTSASESASTSASASASTSASASASTSASASASTSASASTSASESASTSASASASTSASASASTSASASASTSASASASTSASASASTSASVSASTSASASASTSASASASTSASESASTSASASASTSASASASTSASASASTSASASASTSASASASTSASESASTSASASASTSASASASTSASASASTSASASASTSASASASISASESASTSASASASTSASASASTSASASASTSASESASTSASASASTSASASASTSASASASTSASASASTSASASASTSASASASTSASESASTSASASASTSASESASTSASASASTSASASASTSASASASTSASASASTSASASASTSASASASTSASASTSASESASTSASASASTSASASASTSASASASTSASESASTSASASASTSASASASTSASASASTSASASASTSASASASISASESASTSASASASTSASVSASTSASASASTSASESASTSASASASTSASESASTSASASASTSASASASISASESASTSASASASTSASASASTSASASASTSASESASTSTSASASTSASESASTSASASASTSASASASTSASASASTSASASASTSASASTSASESASTSASASASTSASASASTSASASASTSASASASTSASASASTSASASASTSASASASTSASASASTSASASASTSASASASTSASASASTSASESASTSASASASTSASASASTSASASASTSASVSASTSASESASTSASASASTSASASASTSASASASTSASESASTSASASASTSASASASTSASESASTSASASASTSASASASTSASASASTSASASASASTSASASASTSASASASTSASASASISASESASTSASASASASTSASASASTSASASASTSASASASISASESASTSASESASTSTSASASTSASESASTSASASASTSASASASTSASASASTSASASTSASESASTSASASASTSASASASTSASASASTSASASASTSASASASTSASVSASTSASASASTSASASASTSASESASTSASASTSASESASTSASASASTSASASASTSASASASTSASESASTSASASASTSASASASTSASESASTSASASASTSASASASTSASASASTSASESASTSASASASTSASESASTSASASASTSASASASTSASGSASTSTSASASTSASASASTSASASASISASESASTSASESASTSTSASASTSASESASTSASASASTSASASASTSASASASTSASASTSASESASTSASASASTSASASASTSASASASTSASASASTSASVSASTSASASASTSASASASTSASESASTSASASASTSASASASTSASASASTSASASASTSASASASTSASESASTSASASASTSASASASTSASASASTSASASASTSASASASISASESASTSASASASTSASASASTSASASASTSASESASTSASASASTSASASASTSASASASTSASASASTSASASASTSASASASTSASESASTSASASASTSASESASTSASASASTSASASASTSASASASTSASASASTSASASASTSASASASTSASASTSASESASTSASASASTSASASASTSASASASTSASESASTSASASASTSASASASTSASASASTSASASASTSASASASISASESASTSASASASTSASVSASTSASASASTSASESASTSASASASTSASESASTSASASASTSASASASISASESASTSASASASTSASASASTSASASASTSASESASTSTSASASTSASESASTSASASASTSASASASTSASASASTSASASASTSASASTSASESASTSASASASTSASASASTSASASASTSASASASTSASASASTSASASASTSASASASTSASASASTSASESASTSASASASTSASASASTSASASASTSASASASTSASVSASTSASESASTSASASASTSASASASTSASESASTSASASASTSASESASTSASASASTSASASASTSASASASTSASASASTSASASASTSASASASTSASASASTSASASASTSASASASTSASASASTSASASASTSASASASTSASASASISASESASTSASASASTSASASASTSASVSASTSASASASTSASASASISASESASTSASASASTSASASASTSASASASTSASASASISASESASTSASASASTSASASASTSASASASTSASASASTSASASASTSASASASTSASASASTSASASASTSASASASTSASESASTSASASASTSASASASISASESASTSASASASTSASASASTSASASASTSASESASTSTSASASTSASESASTSASASASTSASASASTSASASASTSASASASTSASASTSASESASTSASASASTSASASASTSASASASTSASASASTSASASASTSASASASTSASASASTSASASASTSASESASTSASASASTSASASASTSASASASTSASASASTSASVSASTSASESASTSASASASTSASASASTSASESASTSASASASTSASESASTSASASASTSASASASTSASASASTSASASASTSASASASTSASASASTSASASASTSASASASTSASASASTSASASASTSASASASTSASASASTSASASASISASESASTSASASASTSASASASTSASVSASTSASASASTSASASASISASESASTSASASASTSASASASTSASASASTSASASASISASESASTSASASASTSASASASTSASASASTSASASASTSASASASTSASASASTSASASASTSASASASTSASASASTSASASASTSASASASTSASASASTSASASASTSASASASTSVSNSANHSNSQVGNTSGSTGKSQKELPNTGTESSIGSVLLGVLAAVTGIGLVAKRRKRDEEE

SEQ ID NO: 98 - protein, 202 aa, Streptococcus pneumoniae
MSNEKNTNTNVEKKDATVVAHEIKGELTYEDKVIQKIIGLSLENVSGLLGIDGGFFSNLKEKIVNSDDVTSGVNVEVGKTQVAVDLNVIVEYQKNVPALYSEIREIVSSEVAKMTDLEIVEINVNVVDIKTKEQHEADSVSLQDRVSDVAESTGEFTSEQFEKAKSGLGSGFSTVQEKVSEGVEAVKGAANGVVSHENTRVN

SEQ ID NO: 99 - protein, 355 aa, Streptococcus pneumoniae
MTKEKNVILTARDIVVEFDVRDKVLTAIRGVSLELVEGEVLALVGESGSGKSVLTKTFTGMLEENGRIAQGSIDYRGQDLTALSSHKDWEQIRGAKIATIFQDPMTSLDPIKTIGSQITEVIVKHQGKTAKEAKELAIDYMNKVGIPDADRRFNEYPFQYSGGMRQRIVIAIALACRPDVLICDEPTTALDVTIQAQIIDLLKSLQNEYHFTTIFITHDLGVVASIADKVAVMYAGEIVEYGTVEEVFYDPRHPYTWSLLSSLPQLADDKGDLYSIPGTPPSLYTDLKGDAFALRSDYAMQIDFEQKAPQFSVSETHWAKTWLLHEDAPKVEKPAVIANLHDKIREKMGFAHLAD

SEQ ID NO: 100 - protein, 659 aa, Streptococcus pneumoniae
MKKNRVFATAGLVLLAAGVLAACSSSKSSDSSAPKAYGYVYTADPETLDYLISSKNSTTVVTSNGIDGLFTNDNYGNLAPAVAEDWEVSKDGLTYTYKIRKGVKWFTSDGEEYAEVTAKDFVNGLKHAADKKSEAMYLAENSVKGLADYLSGTSTDFSTVGVKAVDDYTLQYTLNQPEPFWNSKLTYSIFWPLNEEFETSKGSDFAKPTDPTSLLYNGPFLLKGLTAKSSVEFVKNEQYWDKENVHLDTINLAYYDGSDQESLERNFTSGAYSYARLYPTSSNYSKVAEEYKDNIYYTQSGSGIAGLGVNIDRQSYNYTSKTTDSEKVATKKALLNKDFRQALNFALDRSAYSAQINGKDGAALAVRNLFVKPDFVSAGEKTFGDLVAAQLPAYGDEWKGVNLADGQDGLFNADKAKAEFAKAKKALEADGVQFPIHLDVPVDQASKNYISRIQSFKQSVETVLGVENVVVDIQQMTSDEFLNITYYAANASSEDWDVSGGVSWGPDYQDPSTYLDILKTTSSETTKTYLGFDNPNSPSVVQVGLKEYDKLVDEAARETSDLNVRYEKYAAAQAWLTDSSLFIPAMASSGAAPVLSRIVPFTGASAQTGSKGSDVYFKYLKSQDKVVTKEEYEKAREKWLKEKAESNEKAQKELASHVK

SEQ ID NO: 101 - protein, 467 aa, Streptococcus pneumoniae
MKKKYWTLAILFFCLFNNSVTAQEIPKNLDGNITHTQTSESFSESDEKQVDYSNKNQEEVDQNKFRIQIDKTELFVTTDKHLEKNCCKLELEPQINNDIVNSESNNLLGEDNLDNKIKENVSHLDNRGGNIEHDKDNLESSIVRKYEWDIDKVTGGGESYKLYSKSNSKVSIAILDSGVDLQNTGLLKNLSNHSKNYVPNKGYLGKEEGEEGIISDIQDRLGHGTAVVAQIVGDDNINGVNPHVNINVYRIFGKSSASPDWIVKAIFDAVDDGNDIINLSTGQYLMIDGEYEDGTNDFETFLKYKKAIDYANQKGVIIVAALGNDSLNVSNQSDLLKLISSRKKVRKPGLVVDVPSYFSSTISVGGIDRLGNLSDFSNKGDSDAIYAPAGSTLSLSELGLNNFINAEKYKEDWIFSATLGGYTYLYGNSFAAPKVSGAIAMIIDKYKLKDQPYNYMFVKKFWKKHYQ

SEQ ID NO: 102 - protein, 308 aa, Streptococcus pneumoniae
MKKDELFEGFYLIKSADLRQTRAGKNYLAFTFQDDSGEIDGKLWDAQPHNIEAFTAGKVVHMKGRREVYNNTPQVNQITLRLPQAGEPNDPADFKVKSPVDVKEIRDYMSQMIFKIENPVWQRIVRNLYTKYDKEFYSYPAAKTNHHAFETGLAYHTATMVRLADAISEVYPQLNKSLLYAGIMLHDLAKVIELTGPDQTEYTVRGNLLGHIALIDSEITKTVMELGIDDTKEEVVLLRHVILSHHGLLEYGSPVRPRIMEAEIIHMIDNLDASMMMMSTALALVDKGEMTNKIFAMDNRSFYKPDLD

SEQ ID NO: 103 - protein, 221 aa, Streptococcus pneumoniae
VTILGKDTVQQSAKGESVTQEATPEYKLENTPGGDKGGNTGSSDANANEGGGSQAGGSAHTGSQNSAQSQASKQLATEKESAKNAIEKAAKDKQDEIKGAPLSDKEKAELLARVEAEKQAALKEIENAKTMEDVKEAETIGVQAIAMVTVPKRPVAPNAAPKTTSAPQATAGTMQDVTYQSPAGKQLPNTGSASSAALASLGLVVATSGFALLGRKTRRRK

SEQ ID NO: 104 - protein, 336 aa, Streptococcus pneumoniae
MNADDTVTIYDVAREAGVSMATVSRVVNGNKNVKENTRKKVLEVIDRLDYRPNAVARGLASKKTTTVGVVIPNITNGYFSSLAKGIDDIAEMYKYNIVLANSDEDNEKEVSVVNTLFSKQVDGIIYMGYHLTDKIRSEFSRSRTPIVLAGTVDVEHQLPSVNIDYKQATIDAVSYLAKENERIAFVSGPLVDDINGKVRLVGYKETLKKAGITYSEGLVFESKYSYDDGYALAERLISSNATAAVVTGDELAAGVLNGLADKGVSVPEDFEIITSDDSQISRFTRPNLTTIAQPLYDLGAISMRMLTKIMHKEELEEREVLLPHGLTERSSTRKRK

SEQ ID NO: 105 - protein, 469 aa, Streptococcus pneumoniae
MKKKLVFPNLFWWGAASSGPQTEGQYGKVHENVMDYWFKTHPEDFFDNVGPLVASNFFHTYTEDFHLMKEIGVNSFRTSIQWSRLIKNLETGEPDPKGIAFYNAIIEEAKKNQMDLVMNLHHFDLPVELLQKYGGWESKHVVELFVKFAKTAFTCFGDKVHYWTTFNEPMVIPEAGYLYAFHYPNLKGKGKEAVQVIYNLNLASAKVIQLYRSLELDGKIGIILNLTPAYPRSNSPEDLEASRFTDDFFNKVFLNPAVKGTFPERLVKQLERDGVLWSHTEKELQLMKSNTVDFLGVNYYHPKRVQAQANPEEYQTPWMPDQYFKEYEWLERRMNPYRGWEIFPKAIYDIAMIVKEEYGNIPWFISENGMGVENEARFIDENGVIDDVYRIEFYEEHLRWLHKAIEEGSHCFGYHAWTAFDCWSWNNAYKNRYGFISVDLETQKRTIKSSGRWYRKVSDNNGFEVEIEE

SEQ ID NO: 106 - protein, 136 aa, Streptococcus pneumoniae
VENLTNFYEKYRVYLTRPRLELLAVVTIVFCAVLVFFLNIPGKGVLKLDNGTIVYDGSLVRGKMNGQGTITFQNGDQYTGGFNNGAFNGKGTFQSKEGWTYEGDFVNGQAEGKGKLTTEQEVVYEGTFKQGVFQQK

SEQ ID NO: 107 - protein, 207 aa, Streptococcus pneumoniae
MLNKIRDYLDFAGLQYRNPDKAGAEREKMLAFRHKGQEARKVFTELAKAFQASHPEWQLQQTSQWMNQAQRLRPHFWVYLQRDGQVTEPMMALRLYGTSTDFGISLEVSFIERKKDEQTLGKQAKVLDIPTVKGIYYLTYSNGQSQRWEANEEKRRTLREKVRSQEVRKVLVKVDVPMTENSSEEEIVEGLLKSYSKILPYYLATRK

SEQ ID NO: 108 - protein, 152 aa, Streptococcus pneumoniae
MVQNSCWQSKSHKVKAFTLLESLLALIVISGGLLLFQAMSQLLISEVRYQQQSEQKEWLLFVDQLEVELDRSQFEKVEGNRLYMKQDGKDIAIGKSKSDDFRKTNARGRGYQPMVYGLKSVRITEDNQLVRFHFQFQKGLEREFIYRVEKEK

SEQ ID NO: 109 - protein, 108 aa, Streptococcus pneumoniae
MKKMMTFLKKAKVKAFTLVEMLVVLLIISVLFLLFVPNLTKQKEAVNDKGKAAVVKVVESQAELYSLEKNEDASLRKLQADGRITEEQAKAYKEYNDKNGGANRKVND

SEQ ID NO: 110 - protein, 299 aa, Streptococcus pneumoniae
MTSKVRKAVIPAAGLGTRFLPATKALAKEMLPIVDKPTIQFIVEEALKSGIEDILVVTGKSKRSIEDHFDSNFELEYNLKEKGKTDLLKLVDKTTDMRLHFIRQTHPRGLGDAVLQAKAFVGNEPFVVMLGDDLMDITDEKAVPLTKQLMDDYERTHASTIAVMPVPHDEVSAYGVIAPQGEGKDGLYSVETFVEKPAPEDAPSDLAIIGRYLLTPEIFEILEKQAPGAGNEIQLTDAIDTLNKTQRVFAREFKGARYDVGDKFGFMKTSIDYALKHPQVKDDLKNYLIQLGKELTEKE

SEQ ID NO: 111 - protein, 821 aa, Streptococcus pneumoniae
MQNQLNELKRKMLEFFQQKQKNKKSARPGKKGSSTKKSKTLDKSVIFPAILLSIKALFNLLFVLGFLGGMLGAGIALGYGVALFDKVRVPQTEELVNQVKDISSISEITYSDGTVIASIESDLLRTSISSEQISENLKKAIIATEDEHFKEHKGVVPKAVIRATLGKFVGLGSSSGGSTLTQQLIKQQVVGDAPTLARKAAEIVDALALERAMNKDEILTTYLNVAPFGRNNKGQNIAGARQAAEGIFGVDASQLTVPQAAFLAGLPQSPITYSPYENTGELKSDEDLEIGLRRAKAVLYSMYRTGALSKDEYSQYKDYDLKQDFLPSGTVTGISRDYLYFTTLAEAQERMYDYLAQRDNVSAKELKNEATQKFYRDLAAKEIENGGYKITTTIDQKIHSAMQSAVADYGYLLDDGTGRVEVGNVLMDNQTGAILGFVGGRNYQENQNNHAFDTKRSPASTTKPLLAYGIAIDQGLMGSETILSNYPTNFANGNPIMYANSKGTGMMTLGEALNYSWNIPAYWTYRMLREKGVDVKGYMEKMGYEIPEYGIESLPMGGGIEVTVAQHTNGYQTLANNGVYHQKHVISKIEAADGRVVYEYQDKPVQVYSKATATIMQGLLREVLSSRVTTTFKSNLTSLNPTLANADWIGKTGTTNQDENMWLMLSTPRLTLGGWIGHDDNHSLSRRAGYSNNSNYMAHLVNAIQQASPSIWGNERFALDPSVVKSEVLKSTGQKPEKVSVEGKEVEVTGSTVTSYWANKSGAPATSYRFAIGGSDADYQNAWSSIVGSLPTPSSSSSSSSSSSDSSNSSTTRPSSSRARR

SEQ ID NO: 112 - protein, 423 aa, Streptococcus pneumoniae
MSSKFMKSAAVLGTATLASLLLVACGSKTADKPADSGSSEVKELTVYVDEGYKSYIEEVAKAYEKEAGVKVTLKTGDALGGLDKLSLDNQSGNVPDVMMAPYDRVGSLGSDGQLSEVKLSDGAKTDDTTKSLVTAANGKVYGAPAVIESLVMYYNKDLVKDAPKTFADLENLAKDSKYAFAGEDGKTTAFLADWTNFYYTYGLLAGNGAYVFGQNGKDAKDIGLANDGSIVGINYAKSWYEKWPKGMQDTEGAGNLIQTQFQEGKTAAIIDGPWKAQAFKDAKVNYGVATIPTLPNGKEYAAFGGGKAWVIPQAVKNLEASQKFVDFLVATEQQKVLYDKTNEIPANTEARSYAEGKNDELTTAVIKQFKNTQPLPNISQMSAVWDPAKNMLFDAVSGQKDAKTAANDAVTLIKETIKQKFGE

SEQ ID NO: 113 - protein, 155 aa, Streptococcus pneumoniae
MIDKVVRNLLLTFFFCKMTKIIIFLTTILVKKKKICYNEFKLRNRKQKGVIMWVLGFILFMIFFYSNNSKKIKKLENKIKRLERKEKGNAEMSRLLQEMIGKEPIITGVYIGPDNWEVVDVDEEWVKLRRVDNTGKEKFKLQRIEDIQTVEFDGE

SEQ ID NO: 114 - protein, 285 aa, Streptococcus pneumoniae
MILSKNREDGLRKFATNIRLNTLRTLNHLGFGHYGGSLSIVEVLAVLYGEIMPMTPEIFAARDRDYFILSKGHGGPALYSTLYLNGFFDKEFLYSLNTNGTKLPSHPDRNLTPGIDMTTGSLGQGISVATGLAYGQRIRKSPFYTYAIVGDGELNEGQCWEAIQFASHQQLSNLIVFVDDNKKQLDGFTKDICNPGDFVEKFSAFGFESIRVKGSDIREIYEGIVQLKQSNNSSPKCIVLDTIKGQGVQELEEMKSNHHLRPTVEEKQMLTSVVERLSQELEETE

SEQ ID NO: 115 - protein, 621 aa, Streptococcus pneumoniae
MKKTTILSLTTAAVILAAYVPNEPILADTPSSEVIKETKVGSIIQQNNIKYKVLTVEGNIGTVQVGNGVTPVEFEAGQDGKPFTIPTKITVGDKVFTVTEVASQAFSYYPDETGRIVYYPSSITIPSSIKKIQKKGFHGSKAKTIIFDKGSQLEKIEDRAFDFSELEEIELPASLEYIGTSAFSFSQKLKKLTFSSSSKLELISHEAFANLSNLEKLTLPKSVKTLGSNLFRLTTSLKHVDVEEGNESFASVDGVLFSKDKTQLIYYPSQKNDESYKTPKETKELASYSFNKNSYLKKLELNEGLEKIGTFAFADAIKLEEISLPNSLETIERLAFYGNLELKELILPDNVKNFGKHVMNGLPKLKSLTIGNNINSLPSFFLSGVLDSLKEIHIKNKSTEFSVKKDTFAIPETVKFYVTSEHIKDVLKSNLSTSNDIIVEKVDNIKQETDVAKPKKNSNQGVVGWVKDKGLWYYLNESGSMATGWVKDKGLWYYLNESGSMATGWVKDKGLWYYLNESGSMATGWVKDKGLWYYLNESGSMATGWVKDKGLWYYLNESGSMATGWVKDKGLWYYLNESGSMATGWVTVSGKWYYTYNSGDLLVNTTTPDGYRVNANGEWVG

SEQ ID NO: 116 - protein, 626 aa, Streptococcus pneumoniae
MVRFTGLSLKQTQAIEVLKGHISLPDVEVAVTQSDQASISIEGEEGHYQLTYRKPHQLYRALSLLVTVLAEADKVEIEEQAAYEDLAYMVDCSRNAVLNVASAKQMIEILALMGYSTFELYMEDTYQIEGQPYFGYFRGAYSAEELQEIEAYAQQFDVTFVPCIQTLAHLSAFVKWGVKEVQELRDVEDILLIGEEKVYDLIDGMFATLSKLKTRKVNIGMDEAHLVGLGRYLILNGVVDRSLLMCQHLERVLDIADKYGFHCQMWSDMFFKLMSADGQYDRDVEIPEETRVYLDRLKDRVTLVYWDYYQDSEEKYNRNFRNHHKISHDLAFAGGAWKWIGFTPHNHFSRLVAIEANKACRANQIKEVIVTGWGDNGGETAQFSILPSLQIWAELSYRNDLDGLSAHFKTNTGLTVEDFMQIDLANLLPDLPGNLSGINPNRYVFYQDILCPILDQHMTPEQDKPHFAQAAETLANIKEKAGNYAYLFETQAQLNAILSSKVDVGRRIRQAYQADDKESLQQIARQELPELRSQIEDFHALFSHQWLKENKVFGLDTVDIRMGGLLQRIKRAESRIEVYLAGQLDRIDELEVEILPFTDFYADKDFAATTANQWHTIATASTIYTT

SEQ ID NO: 117 - protein, 782 aa, Streptococcus pneumoniae
MSNSFVKLLVSQLFANLADIFFRVTIIANIYIISKSVIATSLVPILIGISSFVASLLVPLVTKRLALNRVLSLSQFGKTILLAILVGMFTVMQSVAPLVTYLFVVAISILDGFAAPVSYAIVPRYATDLGKANSALSMTGEAVQLIGWGLGGLLFATIGLLPTTCINLVLYIISSFLMLFLPNAEVEVLESETNLEILLKGWKLVARNPRLRLFVSANLLEIFSNTIWVSSIILVFVTELLNKTESYWGYSNTAYSIGIIISGLIAFRLSEKFLAAKWEPQLFTPNLKTIQNPCLSLDPGWFLFSPNGCFLLDKKEFPLYGISVEKNTKRKETHMNSLPNHHFQNKSFYQLSFDGGHLTQYGGLIFFQELFSQLKLKERISKYLVTNDQRRYCRYSDSDILVQFLFQLLTGYGTDYACKELSADAYFPKLLEGGQLASQPTLSRFLSRTDEETVHSLRCLNLELVEFFLQFHQLNQLIVDIDSTHFTTYGKQEGVAYNAHYRAHGYHPLYAFEGKTGYCFNAQLRPGNRYCSEEADSFITPVLERFNQLLFRMDSGFATPKLYDLIEKTGQYYLIKLKKNTVLSRLGDLSLPCPQDEDLTILPHSAYSETLYQAGSWSHKRRVCQFSERKEGNLFYDVISLVTNMTSGTSQDQFQLYRGRGQAENFIKEMKEGFFGDKTDSSTLIKNEVRMMMSCIAYNLYLFLKHLAGGDFQTLTIKRFRHLFLHVVGKCVRTGRKQLLKLSSLYAYSELFSALYSRIRKVNLNLPVPYEPPRRKASLMMH

SEQ ID NO: 118 - protein, 810 aa, Streptococcus pneumoniae
MNYSKALNECIESAYMVAGHFGARYLESWHLLIAMSNHSYSVAGATLNDYPYEMDRLEEVALELTETDYSQDETFTELPFSRRLQVLFDEAEYVASVVHAKVLGTEHVLYAILHDSNALATRILERAGFSYEDKKDQVKIAALRRNLEERAGWTREDLKALRQRHRTVADKQNSMANMMGMPQTPSGGLEDYTHDLTEQARSGKLEPVIGRDKEISRMIQILSRKTKNNPVLVGDAGVGKTALALGLAQRIASGDVPAEMAKMRVLELDLMNVVAGTRFRGDFEERMNNIIKDIEEDGQVILFIDELHTIMGSGSGIDSTLDAANILKPALARGTLRTVGATTQEEYQKHIEKDAALSRRFAKVTIEEPSVADSMTILQGLKATYEKHHRVQITDEAVETAVKMAHRYLTSRHLPDSAIDLLDEAAATVQNKAKHVKADDSDLSPADKALMDGKWKQAAQLIAKEEEVPVYKDLVTESDILTTLSRLSGIPVQKLTQTDAKKYLNLEAELHKRVIGQDQAVSSISRAIRRNQSGIRSHKRPIGSFMFLGPTGVGKTELAKALAEVLFDDESALIRFDMSEYMEKFAASRLNGAPPGYVGYEEGGELTEKVRNKPYSVLLFDEVEKAHPDIFNVLLQVLDDGVLTDSKGRKVDFSNTIIIMTSNLGATALRDDKTVGFGAKDIRFDQENMEKRMFEELKKAYRPEFINRIDEKVVFHSLSSDHMQEVVKIMVKPLVASLTEKGIDLKLQASALKLLANQGYDPEMGARPLRRTLQTEVEDKLAELLLKGDLVAGSTLKIGVKAGQLKFDIA

SEQ ID NO: 119 - protein, 448 aa, Streptococcus pneumoniae
MKILPFIARGTSYYLKMSVKKLVPFLVVGLMLAAGDSVYAYSRGNGSIARGDDYPAYYKNGSQEIDQWRMYSRQCTSFVAFRLSNVNGFEIPAAYGNANEWGHRARREGYRVDNTPTIGSITWSTAGTYGHVAWVSNVMGDQIEIEEYNYGYTESYNKRVIKANTMTGFIHFKDLDGGSVGNSQSSTSTGGTHYFKTKSAIKTEPLASGTVIDYYYPGEKVHYDQILEKDGYKWLSYTAYNGSYRYVQLEAVNKNPLGNSVLSSTGGTHYFKTKSAIKTEPLVSATVIDYYYPGEKVHYDQILEKDGYKWLSYTAYNGSRRYIQLEGVTSSQNYQNQSGNISSYGSHSSSTVGWKKINGSWYHFKSNGSKSTGWLKDGSSWYYLKLSGEMQTGWLKENGLWYYLGSSGAMKTGWYQVSGKWYYSYSSGALAVNTTVDGYRVNSDGERV

SEQ ID NO: 120 - protein, 150 aa, Streptococcus pneumoniae
MKVIFLADVKGKGKKGEIKEVPTGYAQNFLIKKNLAKEATAQAVGELRGKQKSEEKAHAEMIAEGKAIKAQLEAEETVVEFVEKVGPDGRTFGSITNKKIAEELQKQFGIKIDKRHIQVQAPIRAVGLIDVPVKIYQDITSVINLRVKEG

SEQ ID NO: 121 - protein, 363 aa, Streptococcus pneumoniae
MSEIEIINAKKIYHDVPVIENLNITIPKGSLFTLLGASGCGKTTLLRMIAGFNSIKDGEFYFDDTKINNMEPSKRNIGLVFQNYAIFPHLTVRDNVAFGLMQKKVPKEELIQQTNKYLELMQIAQYADRKPDKLSGGQQQRVTLACALAVNPSVLLMDEPLSNLEAKLRLDMRQTIREIQHEVGITTVYVTHDQEEAMAISDQIAVMKDGVIQQIGRPKELYHKPANEFVATFIGRTNIIPANLEKRSDGAYIVFSDGYALRMPALDQVEEQAIHVSIRPEEFIKDESGDIEGTIRDSVYLGLNTDYFIETGFASKIQVSEESTFEEELQKGNRIRLRINTQKLNIFSADGSQNLIKGVNHGT

SEQ ID NO: 122 - protein, 129 aa, Streptococcus pneumoniae
MVKRRIRRGTREPEKVVVPEQSSIPSYPVSVTSNQGTDVAVEPAKAVAPTTDWKQENGMWYFYNTDGSMATGWVQVNSSWYYLNSNGSMKVNQWFQVGGKWYYVNTSGELAVNTSIDGYRVNDNGEWVR

SEQ ID NO: 123 - protein, 46 aa, Streptococcus pneumoniae
ELRRLSRLVDQELYFGCGWRLSLEWLPSMRKDSWPSNTAPRTTMVQ

SEQ ID NO: 124 - protein, 31 aa, Streptococcus pneumoniae
DCIRKQPFTRDEPNKTCRKTKPSKSYCSYRW

SEQ ID NO: 125 - protein, 26 aa, Streptococcus pneumoniae
GQRNPRRIERVIRMAETKPRISKKEG

SEQ ID NO: 126 - protein, 83 aa, Streptococcus pneumoniae
QRKLFKIFHLFQKKSGWNQKSSCLKLNLNSLNRKMTQMTKMFRSIFQPKKPLNTNFQAYNSLHQINQKISLKRRKLSEKISKS

SEQ ID NO: 127 - protein, 104 aa, Streptococcus pneumoniae
LVIIVLKIQSKSETDFIFKTWPFILLSKIIPLMVLDCQVSISWTNRETVAYSKLLAIKTLKGDYHDGQSKKIRLSHASRVRTPSWYPHDMADSTRIMAFSRKGC

SEQ ID NO: 128 - protein, 30 aa, Streptococcus pneumoniae
ERLPAFPRSLSGRKLDQGGTKEKGSDGRSP

SEQ ID NO: 129 - protein, 245 aa, Streptococcus pneumoniae
RNCLSTWKSSSNYHTEIKRGTVRQCLGKGRFKEVYSADYAQQSYENNRKRSVKKSSLTKELKEKILHYHNQKFSPEMMVMAKGVNVGISTIYYWIHHGKLGLSKQDLLYPRKGKALKKQASTNFKPAGQSIEQRPEAINLRLENGHYEIDTVLLTRSKNYCLIVLTDRKSRHQIIRLIPNKSAEVVNQALKLILKQHKILSITADNGTEFNRLFDIFSEEHIYYAHPYASWERGTNENHNRLIRR

SEQ ID NO: 130 - protein, 36 aa, Streptococcus pneumoniae
PVMTISSPTMKNMDLSTKASPSQPLQGKHGMIWSGK

SEQ ID NO: 131 - protein, 28 aa, Streptococcus pneumoniae
TSSIRIHTRKSSPNWTTTPHLALSAETN

SEQ ID NO: 132 - protein, 27 aa, Streptococcus pneumoniae
YFLPHKYARESLSLPSTNKILHRKQGS

SEQ ID NO: 133 - protein, 53 aa, Streptococcus pneumoniae
AAFKKDQINERVEKLGKLKPITINYNGKSEVIDSKEKLQELMNKAVKDEVAQI

SEQ ID NO: 134 - protein, 33 aa, Streptococcus pneumoniae
AYAHSKRSAGSGRAGGRQCLCQCQNKCRRDFKY

SEQ ID NO: 135 - protein, 36 aa, Streptococcus pneumoniae
HGRPYHKPHQPHHHGFPQQSYNLLPPKHKPTLCVRR

SEQ ID NO: 136 - protein, 130 aa, Streptococcus pneumoniae
KGKILLLPRLTTQRWQRKIRPDSRKSANNKANLDFHNSRCKSSLSDEAPNLHKNPALLVHSLSRVIAVLLELSPLQAYSIVKFSPKEDDLIHDDAILVRFGILEVHDSPYELLLLYHTHSYRFSCSIYLS

SEQ ID NO: 137 - protein, 144 aa, Streptococcus pneumoniae
FTVSHVFLLYLSFNPRPKSMSLSFTSSKLLRPRFRTFIISASDFSVKSCTVLIPARFKQLYERTDKSSSSIVRSKIRSSDSVSASFITSVDLAISVRFVNKSRCSVKIRAESPKASSGIIVPFVKISRVNLSKPSLLPTRAGST

SEQ ID NO: 138 - protein, 18 aa, Streptococcus pneumoniae
LVCMKNKGCYKERNNCCH

SEQ ID NO: 139 - protein, 58 aa, Streptococcus pneumoniae
FHYLSKYFLVSAITTGDKTKRAIKFGRAIKALTISAIIQTISNSINPPNKTMSTKTTR

SEQ ID NO: 140 - protein, 47 aa, Streptococcus pneumoniae
GKKVFIKYPLSRVSSKTGPMITGRTKDKIVDKKVGCPFEKSTVKYSS

SEQ ID NO: 141 - protein, 37 aa, Streptococcus pneumoniae
SSPVFPKLVMVSGANKPRERRNFPFSSKMSFHLTFVL

SEQ ID NO: 142 - protein, 77 aa, Streptococcus pneumoniae
YLTSFSVPKIASSKVKLTRYWRSSPWRGAFGLREEPPPPKKLEKISSKPPKPPAPLKPPKPPAPPKPPLAPAAPYWS

SEQ ID NO: 143 - protein, 89 aa, Streptococcus pneumoniae
QSWRPIPDSKCYTQEKLTIPIKRRKDIKDFYHNSIQRHKNSHKSHLLDSYRLIITRLAEIVHENKILIVLILYVTNIPSRSRRYEVNRV

SEQ ID NO: 144 - protein, 60 aa, Streptococcus pneumoniae
LFRFYRVIVLYRGWHIYLLILVNLQYVQNVFRKDRFLVRGAQPFFHGERSAGHLVLPYVL

SEQ ID NO: 145 - protein, 60 aa, Streptococcus pneumoniae
ITHPPLNPEHFVSRVFSSLGLKSYQPKDDRFLRKPSDSRHPESGNSGKWQVLNSPLVIVK

SEQ ID NO: 146 - protein, 30 aa, Streptococcus pneumoniae
TLAKAVGLMYSPPIPPKPFLGRITTDSSSI

SEQ ID NO: 147 - protein, 83 aa, Streptococcus pneumoniae
PGSPFSEISGAGFFGVAKRIFPRPPRPPWATINSCPCSIKSVKTLPVSASRTVVPCGTRTLRSSAPRPCIPLVIPFSPESALK

SEQ ID NO: 148 - protein, 111 aa, Streptococcus pneumoniae
INSLTLATSLSKRRAPRKASKASPRMVSRLRPPDFSSPLPNLINWSNWQSRAKPAKLSSRTIIARSFDRSPSGFLGYFLYRYSEINNCRTASPKNSKRSLCEIFKRRCSLA

SEQ ID NO: 149 - protein, 49 aa, Streptococcus pneumoniae
PIGKRNCKAECQSHHLLEKQKTFQSRKTKRYGASPEPRYRESRKPRLSQ

SEQ ID NO: 150 - protein, 58 aa, Streptococcus pneumoniae
QPLGHSKAEEHETICSHTFDNHTTETIPNQVKGRDMTSSETLPFPSKNQNQGKAKQIP

SEQ ID NO: 151 - protein, 125 aa, Streptococcus pneumoniae
PCSLPDYGLVGSGYHSCHYQSNDTRFLESHGNWRTLLYSWSWILCQEKTLFPHDLASLYPSCVRTSIHRYCLLHVKKLRNSISTFFFTHIDKVLVQAHIISQFWMKRTYQHIFFLGCNNLIVHCC

SEQ ID NO: 152 - protein, 69 aa, Streptococcus pneumoniae
RVKDNHLDKLVKALLKRRSSTQYYIHQLLRKMIRLYGHQQLHNNSEILVYSDYGHVDLLLLETNKIPVY

SEQ ID NO: 153 - protein, 40 aa, Streptococcus pneumoniae
QVIKIDIATTNKTESVKSQSEREKKRLTSSNILKVRGRPI

SEQ ID NO: 154 - protein, 32 aa, Streptococcus pneumoniae
AFKSSKVPSLDPSSTKTYSISVSKSGSKASRA

SEQ ID NO: 155 - protein, 69 aa, Streptococcus pneumoniae
DKTDPLARKLPDKSKPSTSFCTKSLSPVNMASLTSAKPSKTKASLGICSPADKRMTSPSTNSSGLRATS

SEQ ID NO: 156 - protein, 38 aa, Streptococcus pneumoniae
LCRLQTQARPRGSVTNLTKQNKVYRYLNYLRQTQLSAM

SEQ ID NO: 157 - protein, 110 aa, Streptococcus pneumoniae
CIQSIGNEGQCKGNSCYVGKEIHLAPISDIVGHKGKEEGDDGNDDGRQFYLFLAHLVGSAFLRSFPLLYSKGINEEGDGIGNDGRLISKDIINSTGQNGINNTKVISPFA

SEQ ID NO: 158 - protein, 121 aa, Streptococcus pneumoniae
TSTKLVIDTTTFMTFCTNNTKSSKFTNTFTKLDVGTTTRHVGCDGNGTTLTSIHDDLGFSIVVFGIQDFVRNTSCNQFLRNVVTSFNRYCTNQDRLTLLVTSLNVFDNRFKLRFDTCIKKV

SEQ ID NO: 159 - protein, 27 aa, Streptococcus pneumoniae
ISTGVPTCSMYPLLKTAILSDKVKASS

SEQ ID NO: 160 - protein, 34 aa, Streptococcus pneumoniae
LSTMSSIKSILCSLPTHTIFSKSAISPKRGSTAI

SEQ ID NO: 161 - protein, 111 aa, Streptococcus pneumoniae
SCSYSSTNSKACSIVGLSKPTIFICVTPISAAKAISSASRPANSSTFKCVCVSKIISSNLVFYLLLYQKRGGAPNFSVSPPLFNRELFCYLFYPILPISYSTVRDRRDWLH

SEQ ID NO: 162 - protein, 110 aa, Streptococcus pneumoniae
VTSCIVPAVACGALVVLGAALGATGLLGTVTMAMACTPIVSASFTSSIVFAFSISLRAACFSASTLAKSSAFSLSESGAPLISSCLSLAAFSMAFLADSFSVANCLEACD

SEQ ID NO: 163 - protein, 53 aa, Streptococcus pneumoniae
YSPFNHSILIRKTTKIINPNPKAPRMNWRSKVWSNQPVNISTNHTKSDRPIKK

SEQ ID NO: 164 - protein, 48 aa, Streptococcus pneumoniae
DYFKFRTTFTRFSTVKPYSANTFGAGAEAPKVSIPRTAPSRPTYLYQF

SEQ ID NO: 165 - protein, 74 aa, Streptococcus pneumoniae
RGRRGLCVARIKAPRLVIKPKRTIDPPTKDRYSPPLSATSLSVPKSPIISFPAKMDKNPKRKLNSKVIFNASVT

SEQ ID NO: 166 - protein, 30 aa, Streptococcus pneumoniae
TPPYTKIPAKTAIIPFISAQDFNQAQRLSG

SEQ ID NO: 167 - protein, 279 aa, Streptococcus pneumoniae
MGIALENVNFIYQEGTPLASAALSDVSLTIEDGSYTALIGHTGSGKSTILQLLNGLLVPSQGSVRVFDTLITSTSKNKDIRQIRKQVGLVFQFAENQIFEETVLKDVAFGPQNFGVSEEDAVKTAREKLALVGIDESLFDRSPFELSGGQMRRVAIAGILAMEPSILVLDEPTAGLDPLGRKELMTLFKKLHQSGMTIVLVTHLMDDVAEYANQVYVMEKGRLVKGGKPSDVFQDVVFMEEVQLGVPKITAFCKRLADRGVSFKRLPIKIEEFKESLNG

SEQ ID NO: 168 - protein, 132 aa, Streptococcus pneumoniae
MVMTDPIADFLTRIRNANQAKHEVLEVPASNIKKGIAEILKREGFVKNVEIIEDDKQGVIRVFLKYGPNGEKVITNLKRVSKPGLRVYKKREDLPKVLNGLGIAILSTSEGLLTDKEARQKNVGGEVIAYVW

SEQ ID NO: 169 - protein, 471 aa, Streptococcus pneumoniae
MANKAVNDFILAMNYDKKKLLTHQGESIENRFIKEGNQLPDEFVVIERKKRSLSTNTSDISVTATNDSRLYPGALLVVDETLLENNPTLLAVDRAPMTYSIDLPGLASSDSFLQVEDPSNSSVRGAVNDLLAKWHQDYGQVNNVPARMQYEKITAHSMEQLKVKFGSDFEKTGNSLDIDFNSVHSGEKQIQIVNFKQIYYTVSVDAVKNPGDVFQDTVTVEDLKQRGISAERPLVYISSVAYGRQVYLKLETTSKSDEVEAAFEALIKGVKVAPQTEWKQILDNTEVKAVILGGDPSSGARVVTGKVDMVEDLIQEGSRFTADHLGLPISYTTSFLRDNVVATFQNSTDYVETKVTAYRNGDLLLDHSGAYVAQYYITWNELSYDHQGKEVLTPKAWDRNGQDLTAHFTTSIPLKGNVRNLSVKIRECTGLAWEWWRTVYEKTDLPLVRKRTISIWGTTLYPQVEDKVEND

SEQ ID NO: 170 - protein, 464 aa, Streptococcus pneumoniae
MANKAVNDFILAMNYDKKKLLTHQGESIENRFIKEGNQLPDEFVVIERKKRSLSTNTSDISVTATNDSRLYPGALLVVDETLLENNPTLLAVDRAPMTYSIDLPGLASSDSFLQVEDPSNSSVRGAVNDLLAKWHQDYGQVNNVPARMQYEKITAHSMEQLKVKFGSDFEKTGNSLDIDFNSVHSGEKQIQIVNFKQIYYTVSVDAVKNPGDVFQDTVTVEDLKQRGISAERPLVYISSVAYGRQVYLKLETTSKSDEVEAAFEALIKGVKVAPQTEWKQILDNTEVKAVILGGDPSSGARVVTGKVDMVEDLIQEGSRFTADHLGLPISYTTSFLRDNVVATFQNSTDYVETKVTAYRNGDLLLDHSGAYVAQYYITWNELSYDHQGKEVLTPKAWDRNGQDLTAHFTTSIPLKGNVRNLSVKIRECTGLAWEWWRTVYEKTDLPLVRKRTISIWGTTLYPQV

SEQ ID NO: 171 - protein, 471 aa, Streptococcus pneumoniae
MANKAVNDFILAMNYDKKKLLTHQGESIENRFIKEGNQLPDEFVVIERKKRSLSTNTSDISVTATNDSRLYPGALLVVDETLLENNPTLLAVDRAPMTYSIDLPGLASSDSFLQVEDPSNSSVRGAVNDLLAKWHQDYGQVNNVPARMQYEKITAHSMEQLKVKFGSDFEKTGNSLDIDFNSVHSGEKQIQIVNFKQIYYTVSVDAVKNPGDVFQDTVTVEDLKQRGISAERPLVYISSVAYGRQVYLKLETTSKSDEVEAAFEALIKGVKVAPQTEWKQILDNTEVKAVILGGDPSSGARVVTGKVDMVEDLIQEGSRFTADHLGLPISYTTSFLRDNVVATFQNSTDYVETKVTAYRNGDLLLDHSGAYVAQYYITWNELSYDHQGKEVLTPKAWDRNGQDLTAHFTTSIPLKGNVRNLSVKIRECTGLAFEWWRTVYEKTDLPLVRKRTISIWGTTLYPQVEDKVEND

SEQ ID NO: 172 - protein, 886 aa, Streptococcus pneumoniae
MKKVRKIFQKAVAGLCCISQLTAFSSIVALAETPETSPAIGKVVIKETGEGGALLGDAVFELKNNTDGTTVSQRTEAQTGEAIFSNIKPGTYTLTEAQPPVGYKPSTKQWTVEVEKNGRTTVQGEQVENREEALSDQYPQTGTYPDVQTPYQIIKVDGSEKNGQHKALNPNPYERVIPEGTLSKRIYQVNNLDDNQYGIELTVSGKTVYEQKDKSVPLDVVILLDNSNSMSNIRNKNARRAERAGEATRSLIDKITSDSENRVALVTYASTIFDGTEFTVEKGVADKNGKRLNDSLFWNYDQTSFTTNTKDYSYLKLTNDKNDIVELKNKVPTEAEDHDGNRLMYQFGATFTQKALMKADEILTQQARQNSQKVIFHITDGVPTMSYPINFNHATFAPSYQNQLNAFFSKSPNKDGILLSDFITQATSGEHTIVRGDGQSYQMFTDKTVYEKGAPAAFPVKPEKYSEMKAAGYAVIGDPINGGYIWLNWRESILAYPFNSNTAKITNHGDPTRWYYNGNIAPDGYDVFTVGIGINGDPGTDEATATSFMQSISSKPENYTNVTDTTKILEQLNRYFHTIVTEKKSIENGTITDPMGELIDLQLGTDGRFDPADYTLTANDGSRLENGQAVGGPQNDGGLLKNAKVLYDTTEKRIRVTGLYLGTDEKVTLTYNVRLNDEFVSNKFYDTNGRTTLHPKEVEQNTVRDFPIPKIRDVRKYPEITISKEKKLGDIEFIKVNKNDKKPLRGAVFSLQKQHPDYPDIYGAIDQNGTYQNVRTGEDGKLTFKNLSDGKYRLFENSEPAGYKPVQNKPIVAFQIVNGEVRDVTSIVPQDIPAGYEFTNDKHYITNEPIPPKREYPRTGGIGMLPFYLIGCMMMGGVLLYTRKHP

SEQ ID NO: 173 - protein, 665 aa, Streptococcus pneumoniae; identical to SEQ ID NO: 56

SEQ ID NO: 174 - protein, 644 aa, Streptococcus pneumoniae
MKSINKFLTMLAALLLTASSLFSAATVFAADNVSTAPDAVTKTLTIHKLLLSEDDLKTWDTNGPKGYDGTQSSLKDLTGVVAEEIPNVYFELQKYNLTDGKEKENLKDDSKWTTVHGGLTTKDGLKIETSTLKGVYRIREDRTKTTYVGPNGQVLTGSKAVPALVTLPLVNNNGTVIDAHVFPKNSYNKPVVDKRIADTLNYNDQNGLSIGTKIPYVVNTTIPSNATFATSFWSDEMTEGLTYNEDVTITLNNVAMDQADYEVTKGNNGFNLKLTEAGLAKINGKDADQKIQITYSATLNSLAVADIPESNDITYHYGNHQDHGNTPKPTKPNNGQITVTKTWDSQPAPEGVKATVQLVNAKTGEKVGAPVELSENNWTYTWSGLDNSIEYKVEEEYNGYSAEYTVESKGKLGVKNWKDNNPAPINPEEPRVKTYGKKFVKVDQKDTRLENAQFVVKKADSNKYIAFKSTAQQAADEKAAATAKQKLDAAVAAYTNAADKQAAQALVDQAQQEYNVAYKEAKFGYVEVAGKDEAMVLTSNTDGQFQISGLAAGTYKLEEIKAPEGFAKIDDVEFVVGAGSWNQGEFNYLKDVQKNDATKVVNKKITIPQTGGIGTIIFAVAGAAIMGIAVYAYVKNNKDEDQLA

SEQ ID NO: 175 - protein, 654 aa, Streptococcus pneumoniae
MKSINKFLTILAALLLTVSSLFSAATVFAAEQKTKTLTVHKLLMTDQELDAWNSDAITTAGYDGSQNFEQFKQLQGVPQGVTEISGVAFELQSYTGPQGKEQENLTNDAVWTAVNKGVTTETGVKFDTEVLQGTYRLVEVRKESTYVGPNGKVLTGMKAVPALITLPLVNQNGVVENAHVYPKNSEDKPTATKTFDTAAGFVDPGEKGLAIGTKVPYIVTTTIPKNSTLATAFWSDEMTEGLDYNGDVVVNYNGQPLDNSHYTLEAGHNGFILKLNEKGLEAINGKDAEATITLKYTATLNALAVADVPEANDVTFHYGNNPGHGNTPKPNKPKNGELTITKTWADAKDAPIAGVEVTFDLVNAQTGEVVKVPGHETGIVLNQTNNWTFTATGLDNNTEYKFVERTIKGYSADYQTITETGKIAVKNWKDENPEPINPEEPRVKTYGKKFVKVDQKDERLKEAQFVVKNEQGKYLALKSAAQQAVNEKAAAEAKQALDAAIAAYTNAADKNAAQAVVDAAQKTYNDNYRAARFGYVEVERKEDALVLTSNTDGQFQISGLAAGSYTLEETKAPEGFAKLGDVKFEVGAGSWNQGDFNYLKDVQKNDATKVVNKKITIPQTGGIGTIIFAVAGAVIMGIAVYAYVKNNKDEDQLA

SEQ ID NO: 176 - protein, 401 aa, Streptococcus pneumoniae
MTMQKMQKMISRIFFVMALCFSLVWGAHAVQAQEDHTLVLQLENYQEVVSQLPSRDGHRLQVWKLDDSYSYDDRVQIVRDLHSWDENKLSSFKKTSFEMTFLENQIEVSHIPNGLYYVRSIIQTDAVSYPAEFLFEMTDQTVEPLVIVAKKTDTMTTKVKLIKVDQDHNRLEGVGFKLVSVARDVSEKEVPLIGEYRYSSSGQVGRTLYTDKNGEIFVTNLPLGNYRFKEVEPLAGYAVTTLDTDVQLVDHQLVTITVVNQKLPRGNVDFMKVDGRTNTSLQGAMFKVMKEESGHYTPVLQNGKEVVVTSGKDGRFRVEGLEYGTYYLWELQAPTGYVQLTSPVSFTIGKDTRKELVTVVKNNKRPRIDVPDTGEETLYILMLVAILLFGSGYYLTKKPNN

SEQ ID NO: 177 - protein, 1063 aa, Streptococcus pneumoniae
DETLITHTAEKPKEEKMIVEEKADKALETKNVVERTEQSEPSSTEAIASEKKEDEAVTPKEEKVSAKPEEKAPRIESQASSQEKPLKEDAKAVTNEEVNQMIENRKVDFNQNWYFKLNANSKEAIKPDADVSTWKKLDLPYDWSIFNDFDHESPAQNEGGQLNGGEAWYRKTFKLDEKDLKKNVRLTFDGVYMDSQVYVNGQLVGHYPNGYNQFSYDITKYLYKDGRENVIAVHAVNKQPSSRWYSGSGIYRDVTLQVTDKVHVEKNGTTILTPKLEEQQHGKVETHVTSKIVNTDDKDHELVAEYQIVERGGHAVTGLVRTASRTLKAHESTSLDAILEVERPKLWTVLNDKPALYELITRVYRDGQLVDAKKDLFGYRYYHWTPNEGFSLNGERIKFHGVSLHHDHGALGAEENYKAEYRRLKQMKEMGVNSIRTTHNPASEQTLQIAAELGLLVQEEAFDTWYGGKKPYDYGRFFEKDATHPEARKGEKWSDFDLRTMVERGKNNPAIFMWSIGNEIGEANGDAHSLATVKRLVKVIKDVDKTRYVTMGADKFRFGNGSGGHEKIADELDAVGFNYSEDNYKALRAKHPKWLIYGSETSSATRTRGSYYRPERELKHSNGPERNYEQSDYGNDRVGWGKTATASWTFDRDNAGYAGQFIWTGTDYIGEPTPWHNQNQTPVKSSYFGIVDTAGIPKHDFYLYQSQWVSVKKKPMVHLLPHWNWENKELASKVADSEGKIPVRAYSNASSVELFLNGKSLGLKTFNKKQTSDGRTYQEGANANELYLEWKVAYQPGTLEAIARDESGKEIARDKITTAGKPAAVRLIKEDHAIAADGKDLTYIYYEIVDSQGNVVPTANNLVRFQLHGQGQLVGVDNGEQASRERYKAQADGSWIRKAFNGKGVAIVKSTEQAGKFTLTAHSDLLKSNQVTVFTGKKEGQEKTVLGTEVPKVQTIIGEAPEMPTTVPFVYSDGSRAERPVTWSLVDVSKPGIVTVKGMADGREVEARVEVIALKSELPVVKRIAPNTNLNSVDKSVSYVLTDGSVQEYEVDKWEIAEEDKAK

SEQ ID NO: 178 - protein, 1093 aa, Streptococcus pneumoniae
IAEEDKAKLAIPGSRIQATGYLEGQPIHATLVVEEGNPAAPVVPTVTVGGEAVTGLTSRQPMQYRTLSYGAQLPEVTASAENADVTVLQASAANGMRASIFIQPKDGGPLQTYAIQFLEEAPKIAHLSLQVEKADSLKEDQTVKLSVRAHYQDGTQAVLPADKVTFSTSGEGEVAIRKGMLELHKPGAVTLNAEYEGAKGQVELTIQANTEKKIAQSIRPVNVVTDLHQEPSLPATVTVEYDKGFPKTHKVTWQAIPKEKLDSYQIFEVLGKVEGIDLEARAKVSVEGIVSVEEVSVTTPIAEAPQLPESVRTYDSNGHVSSAKVAWDAIRPEQYAKEGVFTVNGRLEGTQLTTKLHVRVSAQTEQGANISDQWTGSELPLAFASDSNPSDPVSNVNDKLISYNNQPANRWTNWNRSNPEASVGVLFGDSGILSKRSVDNLSVGFHEDHGVGAPKSYVIEYYVGKTVPTAPKNPSFVGNEDHVFNDSANWKPVTNLKAPAQLKAGEMNHFSFDKVETYAIRIRMVKADNKRGTSITEVQIFAKQVAAAKQGQTRIQVDGKDLANFNPDLTDYYLESVDGKVPAVTANVSNNGLATVVPSVREGEPVRVIAKAENGDILGEYRLHFTKDKNLLSHKPVAAVKQARLLQVGQALELPTKVPVYFTGKDGYETKDLTVEWEEVPAENLTKAGQFTVRGRVLGSNLVAEVTVRVTDKLGETLSDNPNYDENSNQAFASATNDIDKNSHDRVDYLNDGDHSENRRWTNWSPTPSSNPEVSAGVIFRENGKIVERTVAQAKLHFFADSGTDAPSKLVLERYVGPGFEVPTYYSNYQAYESGHPFNNPENWEAVPYRADKDIAAGDEINVTFKAVKAKVMRWRMERKADKSGVAMIEMTFLAPSELPQESTQSKILVDGKELADFAENRQDYQITYKGQRPKVSVEENNQVASTVVDSGEDSLPVLVRLVSESGKQVKEYRIQLTKEKPVSAVQEDLPKLEFVEKDLAYKTVEKKDSTLYLGETRVEQEGKVGKERIFTVINPDGSKEEKLREVVEVPTDRIVLVGTKPVAQEAKKPQVSEKADTKPIDSSEADQTNKAQ

SEQ ID NO: 179 - protein, 883 aa, Streptococcus pneumoniae
MKKVRKIFQKAVAGLCCISQLTAFSSIVALAETPETSPAIGKVVIKETGEGGALLGDAVFELKNNTDGTTVSQRTEAQTGEAIFSNIKPGTYTLTEAQPPVGYKPSTKQWTVEVEKNGRTTVQGEQVENREEALSDQYPQTGTYPDVQTPYQIIKVDGSEKNGQHKALNPNPYERVIPEGTLSKRIYQVNNLDDNQYGIELTVSGKTTVETKEASTPLDVVILLDNSNSMSNIRHNHAHRAEKAGEATRALVDKITSNPDNRVALVTYGSTIFDGSEATVEKGVADANGKILNDSALWTFDRTTFTAKTYNYSFLNLTSDPTDIQTIKDRIPSDAEELNKDKLMYQFGATFTQKALMTADDILTKQARPNSKKVIFHITDGVPTMSYPINFKYTGTTQSYRTQLNNFKAKTPNSSGILLEDFVTWSADGEHKIVRGDGESYQMFTKKPVTDQYGVHQILSITSMEQRAKLVSAGYRFYGTDLYLYWRDSILAYPFNSSTDWITNHGDPTTWYYNGNMAQDGYDVFTVGVGVNGDPGTDEATATRFMQSISSSPDNYTNVADPSQILQELNRYFYTIVNEKKSIENGTITDPMGELIDFQLGADGRFDPADYTLTANDGSSLVNNVPTGGPQNDGGLLKNAKVFYDTTEKRIRVTGLYLGTGEKVTLTYNVRLNDQFVSNKFYDTNGRTTLHPKEVEKNTVRDFPIPKIRDVRKYPEITIPKEKKLGEIEFIKINKNDKKPLRDAVFSLQKQHPDYPDIYGAIDQNGTYQNVRTGEDGKLTFKNLSDGKYRLFENSEPAGYKPVQNKPIVAFQIVNGEVRDVTSIVPQDIPAGYEFTNDKHYITNEPIPPKREYPRTGGIGMLPFYLIGCMMMGGVLLYTRKHP

SEQ ID NO: 180 - protein, 1247 aa, Streptococcus pneumoniae
ADGVTPTTTENQPTIHTVSDSPQSSENRTEETPKAELQPEAPKTVETETPATDKVASLPKTEEKPQEEVSSTPSDKAEVVTPTSAEKETANKKEEEASPKKEEAKEVDSKESNTDKTDKDKPAKKDEAKAEADKPETETGKERAATVNEKLAKKKIVSIDAGRKYFSPEQLKEIIDKAKHYGYTDLHLLVGNDGLRFMLDDMSITANGKTYASDDVKRAIEKGTNDYYNDPNGNHLTESQMTDLINYAKDKGIGLIPTVNSPGHMDAILNAMKELGIQNPNFSYFGKKSARTVDLDNEQAVAFTKALIDKYAAYFAKKTEIFNIGLDEYANDATDAKGWSVLQADKYYPNEGYPVKGYEKFIAYANDLARIVKSHGLKPMAFNDGIYYNSDTSFGSFDKDIIVSMWTGGWGGYDVASSKLLAEKGHQILNTNDAWCYVLGRNADGQGWYNLDQGLNGIKNTPITSVPKTEGADIPIIGGMVAAWADTPSARYSPSHLFKLMRHFANANAEYFAADYESAEQALNEVPKDLNRYTAESVAAVKEAEKAIRSLDSNLSRAQQDTIDQAIAKLQETVNNLTLTPEAQKEEEAKREVEKLAKNKVISIDAGRKYFTLDQLKRIVDKASELGYSDVHLLLGNDGLRFLLNDMTITANGKTYASDDVKKAIIEGTKAYYDDPNGTALTQAEVTELIEYAKSKDIGLIPAINSPGHMDAMLVAMEKLGIKNPQAHFDKVSKTTMDLKNEEAMNFVKALIGKYMDFFAGKTKIFNFGTDEYANDATSAQGWYYLKWYQLYGKFAEYANTLAAMAKERGLQPMAFNDGFYYEDKDDVQFDKDVLISYWSKGWWGYNLASPQYLASKGYKFLNTNGDWYYVIGNHKQDEAYPLSKAVENSGKVPFNQLASTKYPEVDLPTVGSMLSIWADRPSAEYKEEEIFELMTAFADHNKDYFRANYNALREELAKIPTNLEGYSKESLEALDAAKTALNYNLNRNKQAELDTLVANLKAALQGLKPAATHSGSLDENEVAANVETRPELITRTEEIPFEVIKKENPNLPAGQENIITAGVKGERTHYISVLTENGKTTETVLDSQVTKEVINQVVEVGSPVTHKGDESGLAPTTEVKPRLDIQEEEIPFTTVTRENPLLLKGKTQVITKGVNGHRSNFYSVSTSADGKEVKTLVNSVVAQEAVTQIVEVGTMVTHVGDENGQAAIAEEKPKLEIPSQPAPSTAPAEESKALPQDPAPVVTEKK

SEQ ID NO: 181 - protein, 1008 aa, Streptococcus pneumoniae
GAEETTTNTIQQSQKEVQYQQRDTKNLVENGDFGQTEDGSSPWTGSKAQGWSAWVDQKNSSADASTRVIEAKDGAITISSPEKLRAAVHRMVPIEAKKKYKLRFKIKTDNKVGIAKVRIIEESGKDKRLWNSATTSGTKDWQTIEADYSPTLDVDKIKLELFYETGTGTVSFKDIELVEVADQPSEDSQTDKQLEEKIDLPIGKKHVFSLADYTYKVENPDVASVKNGILEPLKEGTTNVIVSKDGKEVKKIPLKILASVKDTYTDRLDDWNGIIAGNQYYDSKNEQMAKLNQELEGKVADSLSSISSQADRIYLWEKFSNYKTSANLTATYRKLEEMAKQVTNPSSRYYQDETVVRTVRDSMEWMHKHVYNSEKSIVGNWWDYEIGTPRAINNTLSLMKEYFSDEEIKKYTDVIEKFVPDPEHFRKTTDNPFKALGGNLVDMGRVKVIAGLLRKDDQEISSTIRSIEQVFKLVDQGEGFYQDGSYIDHTNVAYTGAYGNVLIDGLSQLLPVIQKTKNPIDKDKMQTMYHWIDKSFAPLLVNGELMDMSRGRSISRANSEGHVAAVEVLRGIHRIADMSEGETKQRLQSLVKTIVQSDSYYDVFKNLKTYKDISLMQSLLSDAGVASVPRTSYLSAFNKMDKTAMYNAEKGFGFGLSLFSSRTLNYEHMNKENKRGWYTSDGMFYLYNGDLSHYSDGYWPTVNPYKMPGTTETDAKRADSDTGKVLPSAFVGTSKLDDANATATMDFTNWNQTLTAHKSWFMLKDKIAFLGSNIQNTSTDTAATTIDQRKLESSNPYKVYVNDKEASLTEQEKDYPETQSVFLESSDSKKNIGYFFFKKSSISMSKALQKGAWKDINEGQSDKEVENEFLTISQAHKQNGDSYGYMLIPNVDRATFNQMIKELESSLIENNETLQSVYDAKQGVWGIVKYDDSVSTISNQFQVLKRGVYTIRKEGDEYKIAYYNPETQESAPDQEVFKKLEQAAQPQVQNSKEKEKSEEEKNHSDQKN

SEQ ID NO: 182 - protein, 628 aa, Streptococcus pneumoniae
GAEETTTNTIQQSQKEVQYQQRDTKNLVENGDFGQTEDGSSPWTGSKAQGWSAWVDQKNSSADASTRVIEAKDGAITISSPEKLRAAVHRMVPIEAKKKYKLRFKIKTDNKVGIAKVRIIEESGKDKRLWNSATTSGTKDWQTIEADYSPTLDVDKIKLELFYETGTGTVSFKDIELVEVADQPSEDSQTDKQLEEKIDLPIGKKHVFSLADYTYKVENPDVASVKNGILEPLKEGTTNVIVSKDGKEVKKIPLKILASVKDTYTDRLDDWNGIIAGNQYYDSKNEQMAKLNQELEGKVADSLSSISSQADRIYLWEKFSNYKTSANLTATYRKLEEMAKQVTNPSSRYYQDETVVRTVRDSMEWMHKHVYNSEKSIVGNWWDYEIGTPRAINNTLSLMKEYFSDEEIKKYTDVIEKFVPDPEHFRKTTDNPFKALGGNLVDMGRVKVIAGLLRKDDQEISSTIRSIEQVFKLVDQGEGFYQDGSYIDHTNVAYTGAYGNVLIDGLSQLLPVIQKTKNPIDKDKMQTMYHWIDKSFAPLLVNGELMDMSRGRSISRANSEGHVAAVEVLRGIHRIADMSEGETKQRLQSLVKTIVQSDSYYDVFKNLKTYKDISLMQSLLSDAGVASV

SEQ ID NO: 183 - protein, 452 aa, Streptococcus pneumoniae
ANSEGHVAAVEVLRGIHRIADMSEGETKQRLQSLVKTIVQSDSYYDVFKNLKTYKDISLMQSLLSDAGVASVPRTSYLSAFNKMDKTAMYNAEKGFGFGLSLFSSRTLNYEHMNKENKRGWYTSDGMFYLYNGDLSHYSDGYWPTVNPYKMPGTTETDAKRADSDTGKVLPSAFVGTSKLDDANATATMDFTNWNQTLTAHKSWFMLKDKIAFLGSNIQNTSTDTAATTIDQRKLESSNPYKVYVNDKEASLTEQEKDYPETQSVFLESSDSKKNIGYFFFKKSSISMSKALQKGAWKDINEGQSDKEVENEFLTISQAHKQNGDSYGYMLIPNVDRATFNQMIKELESSLIENNETLQSVYDAKQGVWGIVKYDDSVSTISNQFQVLKRGVYTIRKEGDEYKIAYYNPETQESAPDQEVFKKLEQAAQPQVQNSKEKEKSEEEKNHSDQKN

SEQ ID NO: 184 - protein, 2148 aa, Streptococcus pneumoniae
DETLITHTAEKPKEEKMIVEEKADKALETKNVVERTEQSEPSSTEAIASEKKEDEAVTPKEEKVSAKPEEKAPRIESQASSQEKPLKEDAKAVTNEEVNQMIENRKVDFNQNWYFKLNANSKEAIKPDADVSTWKKLDLPYDWSIFNDFDHESPAQNEGGQLNGGEAWYRKTFKLDEKDLKKNVRLTFDGVYMDSQVYVNGQLVGHYPNGYNQFSYDITKYLYKDGRENVIAVHAVNKQPSSRWYSGSGIYRDVTLQVTDKVHVEKNGTTILTPKLEEQQHGKVETHVTSKIVNTDDKDHELVAEYQIVERGGHAVTGLVRTASRTLKAHESTSLDAILEVERPKLWTVLNDKPALYELITRVYRDGQLVDAKKDLFGYRYYHWTPNEGFSLNGERIKFHGVSLHHDHGALGAEENYKAEYRRLKQMKEMGVNSIRTTHNPASEQTLQIAAELGLLVQEEAFDTWYGGKKPYDYGRFFEKDATHPEARKGEKWSDFDLRTMVERGKNNPAIFMWSIGNEIGEANGDAHSLATVKRLVKVIKDVDKTRYVTMGADKFRFGNGSGGHEKIADELDAVGFNYSEDNYKALRAKHPKWLIYGSETSSATRTRGSYYRPERELKHSNGPERNYEQSDYGNDRVGWGKTATASWTFDRDNAGYAGQFIWTGTDYIGEPTPWHNQNQTPVKSSYFGIVDTAGIPKHDFYLYQSQWVSVKKKPMVHLLPHWNWENKELASKVADSEGKIPVRAYSNASSVELFLNGKSLGLKTFNKKQTSDGRTYQEGANANELYLEWKVAYQPGTLEAIARDESGKEIARDKITTAGKPAAVRLIKEDHAIAADGKDLTYIYYEIVDSQGNVVPTANNLVRFQLHGQGQLVGVDNGEQASRERYKAQADGSWIRKAFNGKGVAIVKSTEQAGKFTLTAHSDLLKSNQVTVFTGKKEGQEKTVLGTEVPKVQTIIGEAPEMPTTVPFVYSDGSRAERPVTWSLVDVSKPGIVTVKGMADGREVEARVEVIALKSELPVVKRIAPNTNLNSVDKSVSYVLTDGSVQEYEVDKWEIAEEDKAKLAIPGSRIQATGYLEGQPIHATLVVEEGNPAAPVVPTVTVGGEAVTGLTSRQPMQYRTLSYGAQLPEVTASAENADVTVLQASAANGMRASIFIQPKDGGPLQTYAIQFLEEAPKIAHLSLQVEKADSLKEDQTVKLSVRAHYQDGTQAVLPADKVTFSTSGEGEVAIRKGMLELHKPGAVTLNAEYEGAKGQVELTIQANTEKKIAQSIRPVNVVTDLHQEPSLPATVTVEYDKGFPKTHKVTWQAIPKEKLDSYQIFEVLGKVEGIDLEARAKVSVEGIVSVEEVSVTTPIAEAPQLPESVRTYDSNGHVSSAKVAWDAIRPEQYAKEGVFTVNGRLEGTQLTTKLHVRVSAQTEQGANISDQWTGSELPLAFASDSNPSDPVSNVNDKLISYNNQPANRWTNWNRSNPEASVGVLFGDSGILSKRSVDNLSVGFHEDHGVGAPKSYVIEYYVGKTVPTAPKNPSFVGNEDHVFNDSANWKPVTNLKAPAQLKAGEMNHFSFDKVETYAIRIRMVKADNKRGTSITEVQIFAKQVAAAKQGQTRIQVDGKDLANFNPDLTDYYLESVDGKVPAVTANVSNNGLATVVPSVREGEPVRVIAKAENGDILGEYRLHFTKDKNLLSHKPVAAVKQARLLQVGQALELPTKVPVYFTGKDGYETKDLTVEWEEVPAENLTKAGQFTVRGRVLGSNLVAEVTVRVTDKLGETLSDNPNYDENSNQAFASATNDIDKNSHDRVDYLNDGDHSENRRWTNWSPTPSSNPEVSAGVIFRENGKIVERTVAQAKLHFFADSGTDAPSKLVLERYVGPGFEVPTYYSNYQAYESGHPFNNPENWEAVPYRADKDIAAGDEINVTFKAVKAKVMRWRMERKADKSGVAMIEMTFLAPSELPQESTQSKILVDGKELADFAENRQDYQITYKGQRPKVSVEENNQVASTVVDSGEDSLPVLVRLVSESGKQVKEYRIQLTKEKPVSAVQEDLPKLEFVEKDLAYKTVEKKDSTLYLGETRVEQEGKVGKERIFTVINPDGSKEEKLREVVEVPTDRIVLVGTKPVAQEAKKPQVSEKADTKPIDSSEADQTNKAQ

SEQ ID NO: 185 - protein, 680 aa, Streptococcus pneumoniae
ASDGTWQGKQYLKEDGSQAANEWVFDTHYQSWFYIKADANYAENEWLKQGDDYFYLKSGGYMAKSEWVEDKGAFYYLDQDGKMKRNAWVGTSYVGATGAKVIEDWVYDSQYDAWFYIKADGQHAEKEWLQIKGKDYYFKSGGYLLTSQWINQAYVNASGAKVQQGWLFDKQYQSWFYIKENGNYADKEWIFENGHYYYLKSGGYMAANEWIWDKESWFYLKFDGKIAEKEWVYDSHSQAWYYFKSGGYMAANEWIWDKESWFYLKFDGKMAEKEWVYDSHSQAWYYFKSGGYMTANEWIWDKESWFYLKSDGKIAEKEWVYDSHSQAWYYFKSGGYMTANEWIWDKESWFYLKSDGKMAEKEWVYDSHSQAWYYFKSGGYMAKNETVDGYQLGSDGKWLGGKATNKNAAYYQVVPVTANVYDSDGEKLSYISQGSVVWLDKDRKSDDKRLAITISGLSGYMKTEDLQALDASKDFIPYYESDGHRFYHYVAQNASIPVASHLSDMEVGKKYYSADGLHFDGFKLENPFLFKDLTEATNYSAEELDKVFSLLNINNSLLENKGATFKEAEEHYHINALYLLAHSALESNWGRSKIAKDKNNFFGITAYDTTPYLSAKTFDDVDKGILGATKWIKENYIDRGRTFLGNKASGMNVEYASDPYWGEKIASVMMKINEKLGGKD

SEQ ID NO: 186 - protein, 294 aa, Streptococcus pneumoniae
ACSKGSEGADLISMKGDVITEHQFYEQVKNNPSAQQVLLNMTIQKVFEKQYGSELDDKEVDDTIAEEKKQYGENYQRVLSQAGMTLETRKAQIRTSKLVELAVKKVAEAELTDEAYKKAFDEYTPDVTAQIIRLNNEDKAKEVLEKAKAEGADFAQLAKDNSTDEKTKENGGEITFDSASTEVPEQVKKAAFALDVDGVSDVITATGTQAYSSQYYIVKLTKKTEKSSNIDDYKEKLKTVILTQKQNDSTFVQSIIGKELQAANIKVKDQAFQNIFTQYIGGGDSSSSSSTSNE

SEQ ID NO: 187 - protein, 218 aa, Streptococcus pneumoniae
ALIFNTQIRNIFIVWNTNKYQVSQVSKEKLEENQDTEGNFDFDSVKAISSEAVLTSQWDAQKLPVIGGIAIPELEMNLPIFKGLDNVNLFYGAGTMKREQVMGEGNYSLASHHIFGVDNANKMLFSPLDNAKNGMKIYLTDKNKVYTYEIREVKRVTPDRVDEVDDRDGVNEITLVTCEDLAATERIIVKGDLKETKDYSQTSDEILTAFNQPYKQFY

SEQ ID NO: 188 - protein, 165 aa, Streptococcus pneumoniae
VPKTATSTETKTITRIIHYVDKVTNQNVKEDVVQPVTLSRTKTENKVTGVVTYGEWTTGNWDEVISGKIDKYKDPDIPTVESQEVTSDSSDKEITVRYDRLSTPEKPIPQPNPEHPSVPTPNPELPNQETPTPDKPTPEPGTPKTETPVNPDPEVPTYETGKREE

SEQ ID NO: 189 - protein, 469 aa, Streptococcus pneumoniae
ANETEVAKTSQDTTTASSSSEQNQSSNKTQTSAEVQTNAAAYWDGDYYVKDDGSKAQSEWIFDNYYKAWFYINSDGRYSQNEWHGNYYLKSGGYMAQNEWIYDSNYKSWFYLKSDGAYAHQEWQLIGNKWYYFKKWGYMAKSQWQGSYFLNGQGAMIQNEWLYDPAYSAYFYLKSDGTYANQEWQKVGGKWYYFKKWGYMARNEWQGNYYLTGSGAMATDEVIMDGARYIFAASGELKEKKDLNVGWVHRDGKRYFFNNREEQVGTEHAKKIIDISEHNGRINDWKKVIDENKVDGVIVRLGYSGKEDKELAHNIKELNRLGIPYGVYLYTYAENETDAENDAKQTIELIKKYNMNLSYPIYYDVENWEYVNKSKRAPSDTDTWVKIINKYMDTMKQAGYQNVYVYSYRSLLQTRLKHPDILKHVNWVAAYTNALEWENPYYSGEKGWQYTSSEYMKGIQGRVDVSVWY

SEQ ID NO: 190 - protein, 366 aa, Streptococcus pneumoniae
AETTDDKIAAQDNKISNLTAQQQEAQKQVDQIQEQVSAIQAEQSNLQAENDRLQAESKKLEGEITELSKNIVSRNQSLEKQARSAQTNGAVTSYINTIVNSKSITEAISRVAAMSEIVSANNKMLEQQKADKKAISEKQVANNDAINTVIANQQKLADDAQALTTKQAELKAAELSLAAEKATAEGEKASLLEQKAAAEAEARAAAVAEAAYKEKRASQQQSVLASANTNLTAQVQAVSESAAAPVRAKVRPTYSTNASSYPIGECTWGVKTLAPWAGDYWGNGAQWATSAAAAGFRTGSTPQVGAIACWNDGGYGHVAVVTAVESTTRIQVSESNYAGNRTIGNHRGWFNPTTTSEGFVTYIYAD

SEQ ID NO: 191 - protein, 821 aa, Streptococcus pneumoniae
ETPETSPAIGKVVIKETGEGGALLGDAVFELKNNTDGTTVSQRTEAQTGEAIFSNIKPGTYTLTEAQPPVGYKPSTKQWTVEVEKNGRTTVQGEQVENREEALSDQYPQTGTYPDVQTPYQIIKVDGSEKNGQHKALNPNPYERVIPEGTLSKRIYQVNNLDDNQYGIELTVSGKTTVETKEASTPLDVVILLDNSNSMSNIRHNHAHRAEKAGEATRALVDKITSNPDNRVALVTYGSTIFDGSEATVEKGVADANGKILNDSALWTFDRTTFTAKTYNYSFLNLTSDPTDIQTIKDRIPSDAEELNKDKLMYQFGATFTQKALMTADDILTKQARPNSKKVIFHITDGVPTMSYPINFKYTGTTQSYRTQLNNFKAKTPNSSGILLEDFVTWSADGEHKIVRGDGESYQMFTKKPVTDQYGVHQILSITSMEQRAKLVSAGYRFYGTDLYLYWRDSILAYPFNSSTDWITNHGDPTTWYYNGNMAQDGYDVFTVGVGVNGDPGTDEATATRFMQSISSSPDNYTNVADPSQILQELNRYFYTIVNEKKSIENGTITDPMGELIDFQLGADGRFDPADYTLTANDGSSLVNNVPTGGPQNDGGLLKNAKVFYDTTEKRIRVTGLYLGTGEKVTLTYNVRLNDQFVSNKFYDTNGRTTLHPKEVEKNTVRDFPIPKIRDVRKYPEITIPKEKKLGEIEFIKINKNDKKPLRDAVFSLQKQHPDYPDIYGAIDQNGTYQNVRTGEDGKLTFKNLSDGKYRLFENSEPAGYKPVQNKPIVAFQIVNGEVRDVTSIVPQDIPAGYEFTNDKHYITNEPIPPKRE

SEQ ID NO: 192 - protein, 824 aa, Streptococcus pneumoniae
ETPETSPAIGKVVIKETGEGGALLGDAVFELKNNTDGTTVSQRTEAQTGEAIFSNIKPGTYTLTEAQPPVGYKPSTKQWTVEVEKNGRTTVQGEQVENREEALSDQYPQTGTYPDVQTPYQIIKVDGSEKNGQHKALNPNPYERVIPEGTLSKRIYQVNNLDDNQYGIELTVSGKTVYEQKDKSVPLDVVILLDNSNSMSNIRNKNARRAERAGEATRSLIDKITSDSENRVALVTYASTIFDGTEFTVEKGVADKNGKRLNDSLFWNYDQTSFTTNTKDYSYLKLTNDKNDIVELKNKVPTEAEDHDGNRLMYQFGATFTQKALMKADEILTQQARQNSQKVIFHITDGVPTMSYPINFNHATFAPSYQNQLNAFFSKSPNKDGILLSDFITQATSGEHTIVRGDGQSYQMFTDKTVYEKGAPAAFPVKPEKYSEMKAAGYAVIGDPINGGYIWLNWRESILAYPFNSNTAKITNHGDPTRWYYNGNIAPDGYDVFTVGIGINGDPGTDEATATSFMQSISSKPENYTNVTDTTKILEQLNRYFHTIVTEKKSIENGTITDPMGELIDLQLGTDGRFDPADYTLTANDGSRLENGQAVGGPQNDGGLLKNAKVLYDTTEKRIRVTGLYLGTDEKVTLTYNVRLNDEFVSNKFYDTNGRTTLHPKEVEQNTVRDFPIPKIRDVRKYPEITISKEKKLGDIEFIKVNKNDKKPLRGAVFSLQKQHPDYPDIYGAIDQNGTYQNVRTGEDGKLTFKNLSDGKYRLFENSEPAGYKPVQNKPIVAFQIVNGEVRDVTSIVPQDIPAGYEFTNDKHYITNEPIPPKRE

SEQ ID NO: 193 - protein, 1630 aa, Artificial Sequence
  Hybrid polypeptide
MAETTDDKIAAQDNKISNLTAQQQEAQKQVDQIQEQVSAIQAEQSNLQAENDRLQAESKKLEGEITELSKNIVSRNQSLEKQARSAQTNGAVTSYINTIVNSKSITEAISRVAAMSEIVSANNKMLEQQKADKKAISEKQVANNDAINTVIANQQKLADDAQALTTKQAELKAAELSLAAEKATAEGEKASLLEQKAAAEAEARAAAVAEAAYKEKRASQQQSVLASANTNLTAQVQAVSESAAAPVRAKVRPTYSTNASSYPIGECTWGVKTLAPWAGDYWGNGAQWATSAAAAGFRTGSTPQVGAIACWNDGGYGHVAVVTAVESTTRIQVSESNYAGNRTIGNHRGWFNPTTTSEGFVTYIYADGSGSGGGGADGVTPTTTENQPTIHTVSDSPQSSENRTEETPKAVLQPEAPKTVETETPATDKVASLPKTEEKPQEEVSSTPSDKAEVVTPTSAEKETANKKAEEASPKKEEAKEVDSKESNTDKTDKDKPAKKDEAKAEADKPATEAGKERAATVNEKLAKKKIVSIDAGRKYFSPEQLKEIIDKAKHYGYTDLHLLVGNDGLRFMLDDMSITANGKTYASDDVKRAIEKGTNDYYNDPNGNHLTESQMTDLINYAKDKGIGLIPTVNSPGHMDAILNAMKELGIQNPNFSYFGKKSARTVDLDNEQAVAFTKALIDKYAAYFAKKTEIFNIGLDEYANDATDAKGWSVLQADKYYPNEGYPVKGYEKFIAYANDLARIVKSHGLKPMAFNDGIYYNSDTSFGSFDKDIIVSMWTGGWGGYDVASSKLLAEKGHQILNTNDAWYYVLGRNADGQGWYNLDQGLNGIKNTPITSVPKTEGADIPIIGGMVAAWADTPSARYSPSRLFKLMRHFANANAEYFAADYESAEQALNEVPKDLNRYTAESVTAVKEAEKAIRSLDSNLSRAQQDTIDQAIAKLQETVNNLTLTPEAQKEEEAKREVEKLAKNKVISIDAGRKYFTLNQLKRIVDKASELGYSDVHLLLGNDGLRFLLDDMTITANGKTYASDDVKKAIIEGTKAYYDDPNGTALTQAEVTELIEYAKSKDIGLIPAINSPGHMDAMLVAMEKLGIKNPQAHFDKVSKTTMDLKNEEAMNFVKALIGKYMDFFAGKTKIFNFGTDEYANDATSAQGWYYLKWYQLYGKFAEYANTLAAMAKERGLQPMAFNDGFYYEDKDDVQFDKDVLISYWSKGWWGYNLASPQYLASKGYKFLNTNGDWYYILGQKPEDGGGFLKKAIENTGKTPFNQLASTKYPEVDLPTVGSMLSIWADRPSAEYKEEEIFELMTAFADHNKDYFRANYNALREELAKIPTNLEGYSKESLEALDAAKTALNYNLNRNKQAELDTLVANLKAALQGLKPAVTHSGSLDENEVAANVETRPELITRTEEIPFEVIKKENPNLPAGQENIITAGVKGERTHYISVLTENGKTTETVLDSQVTKEVINQVVEVGAPVTHKGDESGLAPTTEVKPRLDIQEEEIPFTTVTCENPLLLKGKTQVITKGVNGHRSNFYSVSTSADGKEVKTLVNSVVAQEAVTQIVEVGTMVTHVGDENGQAAIAEEKPKLEIPSQPAPSTAPAEESKVLPQDPAPVVTEKKLEHHHHHH

SEQ ID NO: 194 - protein, 552 aa, Artificial Sequence
  Hybrid polypeptide
MAETTDDKIAAQDNKISNLTAQQQEAQKQVDQIQEQVSAIQAEQSNLQAENDRLQAESKKLEGEITELSKNIVSRNQSLEKQARSAQTNGAVTSYINTIVNSKSITEAISRVAAMSEIVSANNKMLEQQKADKKAISEKQVANNDAINTVIANQQKLADDAQALTTKQAELKAAELSLAAEKATAEGEKASLLEQKAAAEAEARAAAVAEAAYKEKRASQQQSVLASANTNLTAQVQAVSESAAAPVRAKVRPTYSTNASSYPIGECTWGVKTLAPWAGDYWGNGAQWATSAAAAGFRTGSTPQVGAIACWNDGGYGHVAVVTAVESTTRIQVSESNYAGNRTIGNHRGWFNPTTTSEGFVTYIYADGSGSGGGGVSAQESSTYTVKEGDTLSEIAETHNTTVEKLAENNHIDNIHLIYVDQELVIDGPVAPVATPAPATYAAPAAQDETVSAPVAETPVVSETVVSTVSGSEAEAKEWIAQKESGGSYTATNGRYIGRYQLTDSYLNGDYSAENQERVADAYVAGRYGSWTAAKNFWLNNGWYLEHHHHHH

SEQ ID NO: 195 - protein, 2539 aa, Artificial Sequence
  Hybrid polypeptide
MAETTDDKIAAQDNKISNLTAQQQEAQKQVDQIQEQVSAIQAEQSNLQAENDRLQAESKKLEGEITELSKNIVSRNQSLEKQARSAQTNGAVTSYINTIVNSKSITEAISRVAAMSEIVSANNKMLEQQKADKKAISEKQVANNDAINTVIANQQKLADDAQALTTKQAELKAAELSLAAEKATAEGEKASLLEQKAAAEAEARAAAVAEAAYKEKRASQQQSVLASANTNLTAQVQAVSESAAAPVRAKVRPTYSTNASSYPIGECTWGVKTLAPWAGDYWGNGAQWATSAAAAGFRTGSTPQVGAIACWNDGGYGHVAVVTAVESTTRIQVSESNYAGNRTIGNHRGWFNPTTTSEGFVTYIYADGSGSGGGGDETLITHTAEKPKEEKMIVEEKADKALETKNIVERTEQSEPSSTEAIASEKKEDEAVTPKEEKVSAKPEEKAPRIESQASNQEKPLKEDAKAVTNEEVNQMIEDRKVDFNQNWYFKLNANSKEAIKPDADVSTWKKLDLPYDWSIFNDFDHESPAQNEGGQLNGGEAWYRKTFKLDEKDLKKNVRLTFDGVYMDSQVYVNGQLVGHYPNGYNQFSYDITKYLQKDGRENVIAVHAVNKQPSSRWYSGSGIYRDVTLQVTDKVHVEKNGTTILTPKLEEQQHGKVETHVTSKIVNTDDKDHELVAEYQIVERGGHAVTGLVRTASRTLKAHESTSLDAILEVERPKLWTVLNDKPALYELITRVYRDGQLVDAKKDLFGYRYYHWTPNEGFSLNGERIKFHGVSLHHDHGALGAEENYKAEYRRLKQMKEMGVNSIRTTHNPASEQTLQIAAELGLLVQEEAFDTWYGGKKPYDYGRFFEKDATHPEARKGEKWSDFDLRTMVERGKNNPAIFMWSIGNEIGEANGDAHSLATVKRLVKVIKDVDKTRYVTMGADKFRFGNGSGGHEKIADELDAVGFNYSEDNYKALRAKHPKWLIYGSETSSATRTRGSYYRPERELKHSNGPERNYEQSDYGNDRVGWGKTATASWTFDRDNAGYAGQFIWTGTDYIGEPTPWHNQNQTPVKSSYFGIVDTAGIPKHDFYLYQSQWVSVKKKPMVHLLPHWNWENKELASKVADSEGKIPVRAYSNASSVELFLNGKSLGLKTFNKKQTSDGRTYQEGANANELYLEWKVAYQPGTLEAIARDESGKEIARDKITTAGKPAAVRLIKEDHAIAADGKDLTYIYYEIVDSQGNVVPTANNLVRFQLHGQGQLVGVDNGEQASRERYKAQADGSWIRKAFNGKGVAIVKSTEQAGKFTLTAHSDLLKSNQVTVFTGKKEGQEKTVLGTEVPKVQTIIGEAPEMPTTVPFVYSDGSRAERPVTWSSVDVSKPGIVTVKGMADGREVEARVEVIALKSELPVVKRIAPNTDLNSVDKSVSYVLIDGSVEEYEVDKWEIAEEDKAKLAIPGSRIQATGYLEGQPIHATLVVEEGNPAAPAVPTVTVGGEAVTGLTSQKPMQYRTLAYGAKLPEVTASAKNAAVTVLQASAANGMRASIFIQPKDGGPLQTYAIQFLEEAPKIAHLSLQVEKADSLKEDQTVKLSVRAHYQDGTQAVLPADKVTFSTSGEGEVAIRKGMLELHKPGAVTLNAEYEGAKDQVELTIQANTEKKIAQSIRPVNVVTDLHQEPSLPATVTVEYDKGFPKTHKVTWQAIPKEKLDSYQTFEVLGKVEGIDLEARAKVSVEGIVSVEEVSVTTPIAEAPQLPESVRTYDSNGHVSSAKVAWDAIRPEQYAKEGVFTVNGRLEGTQLTTKLHVRVSAQTEQGANISDQWTGSELPLAFASDSNPSDPVSNVNDKLISYNNQPANRWTNWNRTNPEASVGVLFGDSGILSKRSVDNLSVGFHEDHGVGVPKSYVIEYYVGKTVPTAPKNPSFVGNEDHVFNDSANWKPVTNLKAPAQLKAGEMNHFSFDKVETYAVRIRMVKADNKRGTSITEVQIFAKQVAAAKQGQTRIQVDGKDLANFNPDLTDYYLESVDGKVPAVTASVSNNGLATVVPSVREGEPVRVIAKAENGDILGEYRLHFTKDKSLLSHKPVAAVKQARLLQVGQALELPTKVPVYFTGKDGYETKDLTVEWEEVPAENLTKAGQFTVRGRVLGSNLVAEITVRVTDKLGETLSDNPNYDENSNQAFASATNDIDKNSHDRVDYLNDGDHSENRRWTNWSPTPSSNPEVSAGVIFRENGKIVERTVTQGKVQFFADSGTDAPSKLVLERYVGPEFEVPTYYSNYQAYDADHPFNNPENWEAVPYRADKDIAAGDEINVTFKAIKAKAMRWRMERKADKSGVAMIEMTFLAPSELPQESTQSKILVDGKELADFAENRQDYQITYKGQRPKVSVEENNQVASTVVDSGEDSFPVLVRLVSESGKQVKEYRIHLTKEKPVSEKTVAAVQEDLPKIEFVEKDLAYKTVEKKDSTLYLGETRVEQEGKVGKERIFTAINPDGSKEEKLREVVEVPTDRIVLVGTKPVAQEAKKPQVSEKADTKPIDSSEASQTNKAQAAALEHHHHHH

SEQ ID NO: 196 - protein, 1449 aa, Artificial Sequence
  Hybrid polypeptide
MAETTDDKIAAQDNKISNLTAQQQEAQKQVDQIQEQVSAIQAEQSNLQAENDRLQAESKKLEGEITELSKNIVSRNQSLEKQARSAQTNGAVTSYINTIVNSKSITEAISRVAAMSEIVSANNKMLEQQKADKKAISEKQVANNDAINTVIANQQKLADDAQALTTKQAELKAAELSLAAEKATAEGEKASLLEQKAAAEAEARAAAVAEAAYKEKRASQQQSVLASANTNLTAQVQAVSESAAAPVRAKVRPTYSTNASSYPIGECTWGVKTLAPWAGDYWGNGAQWATSAAAAGFRTGSTPQVGAIACWNDGGYGHVAVVTAVESTTRIQVSESNYAGNRTIGNHRGWFNPTTTSEGFVTYIYADGSGSGGGGDETLITHTAEKPKEEKMIVEEKADKALETKNIVERTEQSEPSSTEAIASEKKEDEAVTPKEEKVSAKPEEKAPRIESQASNQEKPLKEDAKAVTNEEVNQMIEDRKVDFNQNWYFKLNANSKEAIKPDADVSTWKKLDLPYDWSIFNDFDHESPAQNEGGQLNGGEAWYRKTFKLDEKDLKKNVRLTFDGVYMDSQVYVNGQLVGHYPNGYNQFSYDITKYLQKDGRENVIAVHAVNKQPSSRWYSGSGIYRDVTLQVTDKVHVEKNGTTILTPKLEEQQHGKVETHVTSKIVNTDDKDHELVAEYQIVERGGHAVTGLVRTASRTLKAHESTSLDAILEVERPKLWTVLNDKPALYELITRVYRDGQLVDAKKDLFGYRYYHWTPNEGFSLNGERIKFHGVSLHHDHGALGAEENYKAEYRRLKQMKEMGVNSIRTTHNPASEQTLQIAAELGLLVQEEAFDTWYGGKKPYDYGRFFEKDATHPEARKGEKWSDFDLRTMVERGKNNPAIFMWSIGNEIGEANGDAHSLATVKRLVKVIKDVDKTRYVTMGADKFRFGNGSGGHEKIADELDAVGFNYSEDNYKALRAKHPKWLIYGSETSSATRTRGSYYRPERELKHSNGPERNYEQSDYGNDRVGWGKTATASWTFDRDNAGYAGQFIWTGTDYIGEPTPWHNQNQTPVKSSYFGIVDTAGIPKHDFYLYQSQWVSVKKKPMVHLLPHWNWENKELASKVADSEGKIPVRAYSNASSVELFLNGKSLGLKTFNKKQTSDGRTYQEGANANELYLEWKVAYQPGTLEAIARDESGKEIARDKITTAGKPAAVRLIKEDHAIAADGKDLTYIYYEIVDSQGNVVPTANNLVRFQLHGQGQLVGVDNGEQASRERYKAQADGSWIRKAFNGKGVAIVKSTEQAGKFTLTAHSDLLKSNQVTVFTGKKEGQEKTVLGTEVPKVQTIIGEAPEMPTTVPFVYSDGSRAERPVTWSSVDVSKPGIVTVKGMADGREVEARVEVIALKSELPVVKRIAPNTDLNSVDKSVSYVLIDGSVEEYEVDKWEIAEEDKAKAAALEHHHHHH

SEQ ID NO: 197 - protein, 1484 aa, Artificial Sequence
  Hybrid polypeptide
MAETTDDKIAAQDNKISNLTAQQQEAQKQVDQIQEQVSAIQAEQSNLQAENDRLQAESKKLEGEITELSKNIVSRNQSLEKQARSAQTNGAVTSYINTIVNSKSITEAISRVAAMSEIVSANNKMLEQQKADKKAISEKQVANNDAINTVIANQQKLADDAQALTTKQAELKAAELSLAAEKATAEGEKASLLEQKAAAEAEARAAAVAEAAYKEKRASQQQSVLASANTNLTAQVQAVSESAAAPVRAKVRPTYSTNASSYPIGECTWGVKTLAPWAGDYWGNGAQWATSAAAAGFRTGSTPQVGAIACWNDGGYGHVAVVTAVESTTRIQVSESNYAGNRTIGNHRGWFNPTTTSEGFVTYIYADGSGSGGGGIAEEDKAKLAIPGSRIQATGYLEGQPIHATLVVEEGNPAAPAVPTVTVGGEAVTGLTSQKPMQYRTLAYGAKLPEVTASAKNAAVTVLQASAANGMRASIFIQPKDGGPLQTYAIQFLEEAPKIAHLSLQVEKADSLKEDQTVKLSVRAHYQDGTQAVLPADKVTFSTSGEGEVAIRKGMLELHKPGAVTLNAEYEGAKDQVELTIQANTEKKIAQSIRPVNVVTDLHQEPSLPATVTVEYDKGFPKTHKVTWQAIPKEKLDSYQTFEVLGKVEGIDLEARAKVSVEGIVSVEEVSVTTPIAEAPQLPESVRTYDSNGHVSSAKVAWDAIRPEQYAKEGVFTVNGRLEGTQLTTKLHVRVSAQTEQGANISDQWTGSELPLAFASDSNPSDPVSNVNDKLISYNNQPANRWTNWNRTNPEASVGVLFGDSGILSKRSVDNLSVGFHEDHGVGVPKSYVIEYYVGKTVPTAPKNPSFVGNEDHVFNDSANWKPVTNLKAPAQLKAGEMNHFSFDKVETYAVRIRMVKADNKRGTSITEVQIFAKQVAAAKQGQTRIQVDGKDLANFNPDLTDYYLESVDGKVPAVTASVSNNGLATVVPSVREGEPVRVIAKAENGDILGEYRLHFTKDKSLLSHKPVAAVKQARLLQVGQALELPTKVPVYFTGKDGYETKDLTVEWEEVPAENLTKAGQFTVRGRVLGSNLVAEITVRVTDKLGETLSDNPNYDENSNQAFASATNDIDKNSHDRVDYLNDGDHSENRRWTNWSPTPSSNPEVSAGVIFRENGKIVERTVTQGKVQFFADSGTDAPSKLVLERYVGPEFEVPTYYSNYQAYDADHPFNNPENWEAVPYRADKDIAAGDEINVTFKAIKAKAMRWRMERKADKSGVAMIEMTFLAPSELPQESTQSKILVDGKELADFAENRQDYQITYKGQRPKVSVEENNQVASTVVDSGEDSFPVLVRLVSESGKQVKEYRIHLTKEKPVSEKTVAAVQEDLPKIEFVEKDLAYKTVEKKDSTLYLGETRVEQEGKVGKERIFTAINPDGSKEEKLREVVEVPTDRIVLVGTKPVAQEAKKPQVSEKADTKPIDSSEASQTNKAQAAALEHHHHHH

SEQ ID NO: 198 - protein, 1209 aa, Artificial Sequence
  Hybrid polypeptide
MASAETTDDKIAAQDNKISNLTAQQQEAQKQVDQIQEQVSAIQAEQSNLQAENDRLQAESKKLEGEITELSKNIVSRNQSLEKQARSAQTNGAVTSYINTIVNSKSITEAISRVAAMSEIVSANNKMLEQQKADKKAISEKQVANNDAINTVIANQQKLADDAQALTTKQAELKAAELSLAAEKATAEGEKASLLEQKAAAEAEARAAAVAEAAYKEKRASQQQSVLASANTNLTAQVQAVSESAAAPVRAKVRPTYSTNASSYPIGECTWGVKTLAPWAGDYWGNGAQWATSAAAAGFRTGSTPQVGAIACWNDGGYGHVAVVTAVESTTRIQVSESNYAGNRTIGNHRGWFNPTTTSEGFVTYIYADGSGSGGGGETPETSPAIGKVVIKETGEGGALLGDAVFELKNNTDGTTVSQRTEAQTGEAIFSNIKPGTYTLTEAQPPVGYKPSTKQWTVEVEKNGRTTVQGEQVENREEALSDQYPQTGTYPDVQTPYQIIKVDGSEKNGQHKALNPNPYERVIPEGTLSKRIYQVNNLDDNQYGIELTVSGKTVYEQKDKSVPLDVVILLDNSNSMSNIRNKNARRAERAGEATRSLIDKITSDSENRVALVTYASTIFDGTEFTVEKGVADKNGKRLNDSLFWNYDQTSFTTNTKDYSYLKLTNDKNDIVELKNKVPTEAEDHDGNRLMYQFGATFTQKALMKADEILTQQARQNSQKVIFHITDGVPTMSYPINFNHATFAPSYQNQLNAFFSKSPNKDGILLSDFITQATSGEHTIVRGDGQSYQMFTDKTVYEKGAPAAFPVKPEKYSEMKAAGYAVIGDPINGGYIWLNWRESILAYPFNSNTAKITNHGDPTRWYYNGNIAPDGYDVFTVGIGINGDPGTDEATATSFMQSISSKPENYTNVTDTTKILEQLNRYFHTIVTEKKSIENGTITDPMGELIDLQLGTDGRFDPADYTLTANDGSRLENGQAVGGPQNDGGLLKNAKVLYDTTEKRIRVTGLYLGTDEKVTLTYNVRLNDEFVSNKFYDTNGRTTLHPKEVEQNTVRDFPIPKIRDVRKYPEITISKEKKLGDIEFIKVNKNDKKPLRGAVFSLQKQHPDYPDIYGAIDQNGTYQNVRTGEDGKLTFKNLSDGKYRLFENSEPAGYKPVQNKPIVAFQIVNGEVRDVTSIVPQDIPAGYEFTNDKHYITNEPIPPKRELEHHHHHH

SEQ ID NO: 199 - protein, 1633 aa, Artificial Sequence
  Hybrid polypeptide
MADGVTPTTTENQPTIHTVSDSPQSSENRTEETPKAVLQPEAPKTVETETPATDKVASLPKTEEKPQEEVSSTPSDKAEVVTPTSAEKETANKKAEEASPKKEEAKEVDSKESNTDKTDKDKPAKKDEAKAEADKPATEAGKERAATVNEKLAKKKIVSIDAGRKYFSPEQLKEIIDKAKHYGYTDLHLLVGNDGLRFMLDDMSITANGKTYASDDVKRAIEKGTNDYYNDPNGNHLTESQMTDLINYAKDKGIGLIPTVNSPGHMDAILNAMKELGIQNPNFSYFGKKSARTVDLDNEQAVAFTKALIDKYAAYFAKKTEIFNIGLDEYANDATDAKGWSVLQADKYYPNEGYPVKGYEKFIAYANDLARIVKSHGLKPMAFNDGIYYNSDTSFGSFDKDIIVSMWTGGWGGYDVASSKLLAEKGHQILNTNDAWYYVLGRNADGQGWYNLDQGLNGIKNTPITSVPKTEGADIPIIGGMVAAWADTPSARYSPSRLFKLMRHFANANAEYFAADYESAEQALNEVPKDLNRYTAESVTAVKEAEKAIRSLDSNLSRAQQDTIDQAIAKLQETVNNLTLTPEAQKEEEAKREVEKLAKNKVISIDAGRKYFTLNQLKRIVDKASELGYSDVHLLLGNDGLRFLLDDMTITANGKTYASDDVKKAIIEGTKAYYDDPNGTALTQAEVTELIEYAKSKDIGLIPAINSPGHMDAMLVAMEKLGIKNPQAHFDKVSKTTMDLKNEEAMNFVKALIGKYMDFFAGKTKIFNFGTDEYANDATSAQGWYYLKWYQLYGKFAEYANTLAAMAKERGLQPMAFNDGFYYEDKDDVQFDKDVLISYWSKGWWGYNLASPQYLASKGYKFLNTNGDWYYILGQKPEDGGGFLKKAIENTGKTPFNQLASTKYPEVDLPTVGSMLSIWADRPSAEYKEEEIFELMTAFADHNKDYFRANYNALREELAKIPTNLEGYSKESLEALDAAKTALNYNLNRNKQAELDTLVANLKAALQGLKPAVTHSGSLDENEVAANVETRPELITRTEEIPFEVIKKENPNLPAGQENIITAGVKGERTHYISVLTENGKTTETVLDSQVTKEVINQVVEVGAPVTHKGDESGLAPTTEVKPRLDIQEEEIPFTTVTCENPLLLKGKTQVITKGVNGHRSNFYSVSTSADGKEVKTLVNSVVAQEAVTQIVEVGTMVTHVGDENGQAAIAEEKPKLEIPSQPAPSTAPAEESKVLPQDPAPVVTEKKGSGSGGGGAETTDDKIAAQDNKISNLTAQQQEAQKQVDQIQEQVSAIQAEQSNLQAENDRLQAESKKLEGEITELSKNIVSRNQSLEKQARSAQTNGAVTSYINTIVNSKSITEAISRVAAMSEIVSANNKMLEQQKADKKAISEKQVANNDAINTVIANQQKLADDAQALTTKQAELKAAELSLAAEKATAEGEKASLLEQKAAAEAEARAAAVAEAAYKEKRASQQQSVLASANTNLTAQVQAVSESAAAPVRAKVRPTYSTNASSYPIGECTWGVKTLAPWAGDYWGNGAQWATSAAAAGFRTGSTPQVGAIACWNDGGYGHVAVVTAVESTTRIQVSESNYAGNRTIGNHRGWFNPTTTSEGFVTYIYADAAALEHHHHHH

SEQ ID NO: 200 - protein, 1433 aa, Artificial Sequence
  Hybrid polypeptide
MADGVTPTTTENQPTIHTVSDSPQSSENRTEETPKAVLQPEAPKTVETETPATDKVASLPKTEEKPQEEVSSTPSDKAEVVTPTSAEKETANKKAEEASPKKEEAKEVDSKESNTDKTDKDKPAKKDEAKAEADKPATEAGKERAATVNEKLAKKKIVSIDAGRKYFSPEQLKEIIDKAKHYGYTDLHLLVGNDGLRFMLDDMSITANGKTYASDDVKRAIEKGTNDYYNDPNGNHLTESQMTDLINYAKDKGIGLIPTVNSPGHMDAILNAMKELGIQNPNFSYFGKKSARTVDLDNEQAVAFTKALIDKYAAYFAKKTEIFNIGLDEYANDATDAKGWSVLQADKYYPNEGYPVKGYEKFIAYANDLARIVKSHGLKPMAFNDGIYYNSDTSFGSFDKDIIVSMWTGGWGGYDVASSKLLAEKGHQILNTNDAWYYVLGRNADGQGWYNLDQGLNGIKNTPITSVPKTEGADIPIIGGMVAAWADTPSARYSPSRLFKLMRHFANANAEYFAADYESAEQALNEVPKDLNRYTAESVTAVKEAEKAIRSLDSNLSRAQQDTIDQAIAKLQETVNNLTLTPEAQKEEEAKREVEKLAKNKVISIDAGRKYFTLNQLKRIVDKASELGYSDVHLLLGNDGLRFLLDDMTITANGKTYASDDVKKAIIEGTKAYYDDPNGTALTQAEVTELIEYAKSKDIGLIPAINSPGHMDAMLVAMEKLGIKNPQAHFDKVSKTTMDLKNEEAMNFVKALIGKYMDFFAGKTKIFNFGTDEYANDATSAQGWYYLKWYQLYGKFAEYANTLAAMAKERGLQPMAFNDGFYYEDKDDVQFDKDVLISYWSKGWWGYNLASPQYLASKGYKFLNTNGDWYYILGQKPEDGGGFLKKAIENTGKTPFNQLASTKYPEVDLPTVGSMLSIWADRPSAEYKEEEIFELMTAFADHNKDYFRANYNALREELAKIPTNLEGYSKESLEALDAAKTALNYNLNRNKQAELDTLVANLKAALQGLKPAVTHSGSLDENEVAANVETRPELITRTEEIPFEVIKKENPNLPAGQENIITAGVKGERTHYISVLTENGKTTETVLDSQVTKEVINQVVEVGAPVTHKGDESGLAPTTEVKPRLDIQEEEIPFTTVTCENPLLLKGKTQVITKGVNGHRSNFYSVSTSADGKEVKTLVNSVVAQEAVTQIVEVGTMVTHVGDENGQAAIAEEKPKLEIPSQPAPSTAPAEESKVLPQDPAPVVTEKKGSGSGGGGVSAQESSTYTVKEGDTLSEIAETHNTTVEKLAENNHIDNIHLIYVDQELVIDGPVAPVATPAPATYAAPAAQDETVSAPVAETPVVSETVVSTVSGSEAEAKEWIAQKESGGSYTATNGRYIGRYQLTDSYLNGDYSAENQERVADAYVAGRYGSWTAAKNFWLNNGWYLEHHHHHH

SEQ ID NO: 201 - protein, 2088 aa, Artificial Sequence
  Hybrid polypeptide
MADGVTPTTTENQPTIHTVSDSPQSSENRTEETPKAVLQPEAPKTVETETPATDKVASLPKTEEKPQEEVSSTPSDKAEVVTPTSAEKETANKKAEEASPKKEEAKEVDSKESNTDKTDKDKPAKKDEAKAEADKPATEAGKERAATVNEKLAKKKIVSIDAGRKYFSPEQLKEIIDKAKHYGYTDLHLLVGNDGLRFMLDDMSITANGKTYASDDVKRAIEKGTNDYYNDPNGNHLTESQMTDLINYAKDKGIGLIPTVNSPGHMDAILNAMKELGIQNPNFSYFGKKSARTVDLDNEQAVAFTKALIDKYAAYFAKKTEIFNIGLDEYANDATDAKGWSVLQADKYYPNEGYPVKGYEKFIAYANDLARIVKSHGLKPMAFNDGIYYNSDTSFGSFDKDIIVSMWTGGWGGYDVASSKLLAEKGHQILNTNDAWYYVLGRNADGQGWYNLDQGLNGIKNTPITSVPKTEGADIPIIGGMVAAWADTPSARYSPSRLFKLMRHFANANAEYFAADYESAEQALNEVPKDLNRYTAESVTAVKEAEKAIRSLDSNLSRAQQDTIDQAIAKLQETVNNLTLTPEAQKEEEAKREVEKLAKNKVISIDAGRKYFTLNQLKRIVDKASELGYSDVHLLLGNDGLRFLLDDMTITANGKTYASDDVKKAIIEGTKAYYDDPNGTALTQAEVTELIEYAKSKDIGLIPAINSPGHMDAMLVAMEKLGIKNPQAHFDKVSKTTMDLKNEEAMNFVKALIGKYMDFFAGKTKIFNFGTDEYANDATSAQGWYYLKWYQLYGKFAEYANTLAAMAKERGLQPMAFNDGFYYEDKDDVQFDKDVLISYWSKGWWGYNLASPQYLASKGYKFLNTNGDWYYILGQKPEDGGGFLKKAIENTGKTPFNQLASTKYPEVDLPTVGSMLSIWADRPSAEYKEEEIFELMTAFADHNKDYFRANYNALREELAKIPTNLEGYSKESLEALDAAKTALNYNLNRNKQAELDTLVANLKAALQGLKPAVTHSGSLDENEVAANVETRPELITRTEEIPFEVIKKENPNLPAGQENIITAGVKGERTHYISVLTENGKTTETVLDSQVTKEVINQVVEVGAPVTHKGDESGLAPTTEVKPRLDIQEEEIPFTTVTCENPLLLKGKTQVITKGVNGHRSNFYSVSTSADGKEVKTLVNSVVAQEAVTQIVEVGTMVTHVGDENGQAAIAEEKPKLEIPSQPAPSTAPAEESKVLPQDPAPVVTEKKGSGSGGGGETPETSPAIGKVVIKETGEGGALLGDAVFELKNNTDGTTVSQRTEAQTGEAIFSNIKPGTYTLTEAQPPVGYKPSTKQWTVEVEKNGRTTVQGEQVENREEALSDQYPQTGTYPDVQTPYQIIKVDGSEKNGQHKALNPNPYERVIPEGTLSKRIYQVNNLDDNQYGIELTVSGKTVYEQKDKSVPLDVVILLDNSNSMSNIRNKNARRAERAGEATRSLIDKITSDSENRVALVTYASTIFDGTEFTVEKGVADKNGKRLNDSLFWNYDQTSFTTNTKDYSYLKLTNDKNDIVELKNKVPTEAEDHDGNRLMYQFGATFTQKALMKADEILTQQARQNSQKVIFHITDGVPTMSYPINFNHATFAPSYQNQLNAFFSKSPNKDGILLSDFITQATSGEHTIVRGDGQSYQMFTDKTVYEKGAPAAFPVKPEKYSEMKAAGYAVIGDPINGGYIWLNWRESILAYPFNSNTAKITNHGDPTRWYYNGNIAPDGYDVFTVGIGINGDPGTDEATATSFMQSISSKPENYTNVTDTTKILEQLNRYFHTIVTEKKSIENGTITDPMGELIDLQLGTDGRFDPADYTLTANDGSRLENGQAVGGPQNDGGLLKNAKVLYDTTEKRIRVTGLYLGTDEKVTLTYNVRLNDEFVSNKFYDTNGRTTLHPKEVEQNTVRDFPIPKIRDVRKYPEITISKEKKLGDIEFIKVNKNDKKPLRGAVFSLQKQHPDYPDIYGAIDQNGTYQNVRTGEDGKLTFKNLSDGKYRLFENSEPAGYKPVQNKPIVAFQIVNGEVRDVTSIVPQDIPAGYEFTNDKHYITNEPIPPKRELEHHHHHH

SEQ ID NO: 202 - protein, 3420 aa, Artificial Sequence
  Hybrid polypeptide
MADGVTPTTTENQPTIHTVSDSPQSSENRTEETPKAVLQPEAPKTVETETPATDKVASLPKTEEKPQEEVSSTPSDKAEVVTPTSAEKETANKKAEEASPKKEEAKEVDSKESNTDKTDKDKPAKKDEAKAEADKPATEAGKERAATVNEKLAKKKIVSIDAGRKYFSPEQLKEIIDKAKHYGYTDLHLLVGNDGLRFMLDDMSITANGKTYASDDVKRAIEKGTNDYYNDPNGNHLTESQMTDLINYAKDKGIGLIPTVNSPGHMDAILNAMKELGIQNPNFSYFGKKSARTVDLDNEQAVAFTKALIDKYAAYFAKKTEIFNIGLDEYANDATDAKGWSVLQADKYYPNEGYPVKGYEKFIAYANDLARIVKSHGLKPMAFNDGIYYNSDTSFGSFDKDIIVSMWTGGWGGYDVASSKLLAEKGHQILNTNDAWYYVLGRNADGQGWYNLDQGLNGIKNTPITSVPKTEGADIPIIGGMVAAWADTPSARYSPSRLFKLMRHFANANAEYFAADYESAEQALNEVPKDLNRYTAESVTAVKEAEKAIRSLDSNLSRAQQDTIDQAIAKLQETVNNLTLTPEAQKEEEAKREVEKLAKNKVISIDAGRKYFTLNQLKRIVDKASELGYSDVHLLLGNDGLRFLLDDMTITANGKTYASDDVKKAIIEGTKAYYDDPNGTALTQAEVTELIEYAKSKDIGLIPAINSPGHMDAMLVAMEKLGIKNPQAHFDKVSKTTMDLKNEEAMNFVKALIGKYMDFFAGKTKIFNFGTDEYANDATSAQGWYYLKWYQLYGKFAEYANTLAAMAKERGLQPMAFNDGFYYEDKDDVQFDKDVLISYWSKGWWGYNLASPQYLASKGYKFLNTNGDWYYILGQKPEDGGGFLKKAIENTGKTPFNQLASTKYPEVDLPTVGSMLSIWADRPSAEYKEEEIFELMTAFADHNKDYFRANYNALREELAKIPTNLEGYSKESLEALDAAKTALNYNLNRNKQAELDTLVANLKAALQGLKPAVTHSGSLDENEVAANVETRPELITRTEEIPFEVIKKENPNLPAGQENIITAGVKGERTHYISVLTENGKTTETVLDSQVTKEVINQVVEVGAPVTHKGDESGLAPTTEVKPRLDIQEEEIPFTTVTCENPLLLKGKTQVITKGVNGHRSNFYSVSTSADGKEVKTLVNSVVAQEAVTQIVEVGTMVTHVGDENGQAAIAEEKPKLEIPSQPAPSTAPAEESKVLPQDPAPVVTEKKGSGSGGGGDETLITHTAEKPKEEKMIVEEKADKALETKNIVERTEQSEPSSTEAIASEKKEDEAVTPKEEKVSAKPEEKAPRIESQASNQEKPLKEDAKAVTNEEVNQMIEDRKVDFNQNWYFKLNANSKEAIKPDADVSTWKKLDLPYDWSIFNDFDHESPAQNEGGQLNGGEAWYRKTFKLDEKDLKKNVRLTFDGVYMDSQVYVNGQLVGHYPNGYNQFSYDITKYLQKDGRENVIAVHAVNKQPSSRWYSGSGIYRDVTLQVTDKVHVEKNGTTILTPKLEEQQHGKVETHVTSKIVNTDDKDHELVAEYQIVERGGHAVTGLVRTASRTLKAHESTSLDAILEVERPKLWTVLNDKPALYELITRVYRDGQLVDAKKDLFGYRYYHWTPNEGFSLNGERIKFHGVSLHHDHGALGAEENYKAEYRRLKQMKEMGVNSIRTTHNPASEQTLQIAAELGLLVQEEAFDTWYGGKKPYDYGRFFEKDATHPEARKGEKWSDFDLRTMVERGKNNPAIFMWSIGNEIGEANGDAHSLATVKRLVKVIKDVDKTRYVTMGADKFRFGNGSGGHEKIADELDAVGFNYSEDNYKALRAKHPKWLIYGSETSSATRTRGSYYRPERELKHSNGPERNYEQSDYGNDRVGWGKTATASWTFDRDNAGYAGQFIWTGTDYIGEPTPWHNQNQTPVKSSYFGIVDTAGIPKHDFYLYQSQWVSVKKKPMVHLLPHWNWENKELASKVADSEGKIPVRAYSNASSVELFLNGKSLGLKTFNKKQTSDGRTYQEGANANELYLEWKVAYQPGTLEAIARDESGKEIARDKITTAGKPAAVRLIKEDHAIAADGKDLTYIYYEIVDSQGNVVPTANNLVRFQLHGQGQLVGVDNGEQASRERYKAQADGSWIRKAFNGKGVAIVKSTEQAGKFTLTAHSDLLKSNQVTVFTGKKEGQEKTVLGTEVPKVQTIIGEAPEMPTTVPFVYSDGSRAERPVTWSSVDVSKPGIVTVKGMADGREVEARVEVIALKSELPVVKRIAPNTDLNSVDKSVSYVLIDGSVEEYEVDKWEIAEEDKAKLAIPGSRIQATGYLEGQPIHATLVVEEGNPAAPAVPTVTVGGEAVTGLTSQKPMQYRTLAYGAKLPEVTASAKNAAVTVLQASAANGMRASIFIQPKDGGPLQTYAIQFLEEAPKIAHLSLQVEKADSLKEDQTVKLSVRAHYQDGTQAVLPADKVTFSTSGEGEVAIRKGMLELHKPGAVTLNAEYEGAKDQVELTIQANTEKKIAQSIRPVNVVTDLHQEPSLPATVTVEYDKGFPKTHKVTWQAIPKEKLDSYQTFEVLGKVEGIDLEARAKVSVEGIVSVEEVSVTTPIAEAPQLPESVRTYDSNGHVSSAKVAWDAIRPEQYAKEGVFTVNGRLEGTQLTTKLHVRVSAQTEQGANISDQWTGSELPLAFASDSNPSDPVSNVNDKLISYNNQPANRWTNWNRTNPEASVGVLFGDSGILSKRSVDNLSVGFHEDHGVGVPKSYVIEYYVGKTVPTAPKNPSFVGNEDHVFNDSANWKPVTNLKAPAQLKAGEMNHFSFDKVETYAVRIRMVKADNKRGTSITEVQIFAKQVAAAKQGQTRIQVDGKDLANFNPDLTDYYLESVDGKVPAVTASVSNNGLATVVPSVREGEPVRVIAKAENGDILGEYRLHFTKDKSLLSHKPVAAVKQARLLQVGQALELPTKVPVYFTGKDGYETKDLTVEWEEVPAENLTKAGQFTVRGRVLGSNLVAEITVRVTDKLGETLSDNPNYDENSNQAFASATNDIDKNSHDRVDYLNDGDHSENRRWTNWSPTPSSNPEVSAGVIFRENGKIVERTVTQGKVQFFADSGTDAPSKLVLERYVGPEFEVPTYYSNYQAYDADHPFNNPENWEAVPYRADKDIAAGDEINVTFKAIKAKAMRWRMERKADKSGVAMIEMTFLAPSELPQESTQSKILVDGKELADFAENRQDYQITYKGQRPKVSVEENNQVASTVVDSGEDSFPVLVRLVSESGKQVKEYRIHLTKEKPVSEKTVAAVQEDLPKIEFVEKDLAYKTVEKKDSTLYLGETRVEQEGKVGKERIFTAINPDGSKEEKLREVVEVPTDRIVLVGTKPVAQEAKKPQVSEKADTKPIDSSEASQTNKAQAAALEHHHHHH

SEQ ID NO: 203 - protein, 2330 aa, Artificial Sequence
  Hybrid polypeptide
MADGVTPTTTENQPTIHTVSDSPQSSENRTEETPKAVLQPEAPKTVETETPATDKVASLPKTEEKPQEEVSSTPSDKAEVVTPTSAEKETANKKAEEASPKKEEAKEVDSKESNTDKTDKDKPAKKDEAKAEADKPATEAGKERAATVNEKLAKKKIVSIDAGRKYFSPEQLKEIIDKAKHYGYTDLHLLVGNDGLRFMLDDMSITANGKTYASDDVKRAIEKGTNDYYNDPNGNHLTESQMTDLINYAKDKGIGLIPTVNSPGHMDAILNAMKELGIQNPNFSYFGKKSARTVDLDNEQAVAFTKALIDKYAAYFAKKTEIFNIGLDEYANDATDAKGWSVLQADKYYPNEGYPVKGYEKFIAYANDLARIVKSHGLKPMAFNDGIYYNSDTSFGSFDKDIIVSMWTGGWGGYDVASSKLLAEKGHQILNTNDAWYYVLGRNADGQGWYNLDQGLNGIKNTPITSVPKTEGADIPIIGGMVAAWADTPSARYSPSRLFKLMRHFANANAEYFAADYESAEQALNEVPKDLNRYTAESVTAVKEAEKAIRSLDSNLSRAQQDTIDQAIAKLQETVNNLTLTPEAQKEEEAKREVEKLAKNKVISIDAGRKYFTLNQLKRIVDKASELGYSDVHLLLGNDGLRFLLDDMTITANGKTYASDDVKKAIIEGTKAYYDDPNGTALTQAEVTELIEYAKSKDIGLIPAINSPGHMDAMLVAMEKLGIKNPQAHFDKVSKTTMDLKNEEAMNFVKALIGKYMDFFAGKTKIFNFGTDEYANDATSAQGWYYLKWYQLYGKFAEYANTLAAMAKERGLQPMAFNDGFYYEDKDDVQFDKDVLISYWSKGWWGYNLASPQYLASKGYKFLNTNGDWYYILGQKPEDGGGFLKKAIENTGKTPFNQLASTKYPEVDLPTVGSMLSIWADRPSAEYKEEEIFELMTAFADHNKDYFRANYNALREELAKIPTNLEGYSKESLEALDAAKTALNYNLNRNKQAELDTLVANLKAALQGLKPAVTHSGSLDENEVAANVETRPELITRTEEIPFEVIKKENPNLPAGQENIITAGVKGERTHYISVLTENGKTTETVLDSQVTKEVINQVVEVGAPVTHKGDESGLAPTTEVKPRLDIQEEEIPFTTVTCENPLLLKGKTQVITKGVNGHRSNFYSVSTSADGKEVKTLVNSVVAQEAVTQIVEVGTMVTHVGDENGQAAIAEEKPKLEIPSQPAPSTAPAEESKVLPQDPAPVVTEKKGSGSGGGGDETLITHTAEKPKEEKMIVEEKADKALETKNIVERTEQSEPSSTEAIASEKKEDEAVTPKEEKVSAKPEEKAPRIESQASNQEKPLKEDAKAVTNEEVNQMIEDRKVDFNQNWYFKLNANSKEAIKPDADVSTWKKLDLPYDWSIFNDFDHESPAQNEGGQLNGGEAWYRKTFKLDEKDLKKNVRLTFDGVYMDSQVYVNGQLVGHYPNGYNQFSYDITKYLQKDGRENVIAVHAVNKQPSSRWYSGSGIYRDVTLQVTDKVHVEKNGTTILTPKLEEQQHGKVETHVTSKIVNTDDKDHELVAEYQIVERGGHAVTGLVRTASRTLKAHESTSLDAILEVERPKLWTVLNDKPALYELITRVYRDGQLVDAKKDLFGYRYYHWTPNEGFSLNGERIKFHGVSLHHDHGALGAEENYKAEYRRLKQMKEMGVNSIRTTHNPASEQTLQIAAELGLLVQEEAFDTWYGGKKPYDYGRFFEKDATHPEARKGEKWSDFDLRTMVERGKNNPAIFMWSIGNEIGEANGDAHSLATVKRLVKVIKDVDKTRYVTMGADKFRFGNGSGGHEKIADELDAVGFNYSEDNYKALRAKHPKWLIYGSETSSATRTRGSYYRPERELKHSNGPERNYEQSDYGNDRVGWGKTATASWTFDRDNAGYAGQFIWTGTDYIGEPTPWHNQNQTPVKSSYFGIVDTAGIPKHDFYLYQSQWVSVKKKPMVHLLPHWNWENKELASKVADSEGKIPVRAYSNASSVELFLNGKSLGLKTFNKKQTSDGRTYQEGANANELYLEWKVAYQPGTLEAIARDESGKEIARDKITTAGKPAAVRLIKEDHAIAADGKDLTYIYYEIVDSQGNVVPTANNLVRFQLHGQGQLVGVDNGEQASRERYKAQADGSWIRKAFNGKGVAIVKSTEQAGKFTLTAHSDLLKSNQVTVFTGKKEGQEKTVLGTEVPKVQTIIGEAPEMPTTVPFVYSDGSRAERPVTWSSVDVSKPGIVTVKGMADGREVEARVEVIALKSELPVVKRIAPNTDLNSVDKSVSYVLIDGSVEEYEVDKWEIAEEDKAKAAALEHHHHHH

SEQ ID NO: 204 - protein, 2365 aa, Artificial Sequence
  Hybrid polypeptide
MADGVTPTTTENQPTIHTVSDSPQSSENRTEETPKAVLQPEAPKTVETETPATDKVASLPKTEEKPQEEVSSTPSDKAEVVTPTSAEKETANKKAEEASPKKEEAKEVDSKESNTDKTDKDKPAKKDEAKAEADKPATEAGKERAATVNEKLAKKKIVSIDAGRKYFSPEQLKEIIDKAKHYGYTDLHLLVGNDGLRFMLDDMSITANGKTYASDDVKRAIEKGTNDYYNDPNGNHLTESQMTDLINYAKDKGIGLIPTVNSPGHMDAILNAMKELGIQNPNFSYFGKKSARTVDLDNEQAVAFTKALIDKYAAYFAKKTEIFNIGLDEYANDATDAKGWSVLQADKYYPNEGYPVKGYEKFIAYANDLARIVKSHGLKPMAFNDGIYYNSDTSFGSFDKDIIVSMWTGGWGGYDVASSKLLAEKGHQILNTNDAWYYVLGRNADGQGWYNLDQGLNGIKNTPITSVPKTEGADIPIIGGMVAAWADTPSARYSPSRLFKLMRHFANANAEYFAADYESAEQALNEVPKDLNRYTAESVTAVKEAEKAIRSLDSNLSRAQQDTIDQAIAKLQETVNNLTLTPEAQKEEEAKREVEKLAKNKVISIDAGRKYFTLNQLKRIVDKASELGYSDVHLLLGNDGLRFLLDDMTITANGKTYASDDVKKAIIEGTKAYYDDPNGTALTQAEVTELIEYAKSKDIGLIPAINSPGHMDAMLVAMEKLGIKNPQAHFDKVSKTTMDLKNEEAMNFVKALIGKYMDFFAGKTKIFNFGTDEYANDATSAQGWYYLKWYQLYGKFAEYANTLAAMAKERGLQPMAFNDGFYYEDKDDVQFDKDVLISYWSKGWWGYNLASPQYLASKGYKFLNTNGDWYYILGQKPEDGGGFLKKAIENTGKTPFNQLASTKYPEVDLPTVGSMLSIWADRPSAEYKEEEIFELMTAFADHNKDYFRANYNALREELAKIPTNLEGYSKESLEALDAAKTALNYNLNRNKQAELDTLVANLKAALQGLKPAVTHSGSLDENEVAANVETRPELITRTEEIPFEVIKKENPNLPAGQENIITAGVKGERTHYISVLTENGKTTETVLDSQVTKEVINQVVEVGAPVTHKGDESGLAPTTEVKPRLDIQEEEIPFTTVTCENPLLLKGKTQVITKGVNGHRSNFYSVSTSADGKEVKTLVNSVVAQEAVTQIVEVGTMVTHVGDENGQAAIAEEKPKLEIPSQPAPSTAPAEESKVLPQDPAPVVTEKKGSGSGGGGIAEEDKAKLAIPGSRIQATGYLEGQPIHATLVVEEGNPAAPAVPTVTVGGEAVTGLTSQKPMQYRTLAYGAKLPEVTASAKNAAVTVLQASAANGMRASIFIQPKDGGPLQTYAIQFLEEAPKIAHLSLQVEKADSLKEDQTVKLSVRAHYQDGTQAVLPADKVTFSTSGEGEVAIRKGMLELHKPGAVTLNAEYEGAKDQVELTIQANTEKKIAQSIRPVNVVTDLHQEPSLPATVTVEYDKGFPKTHKVTWQAIPKEKLDSYQTFEVLGKVEGIDLEARAKVSVEGIVSVEEVSVTTPIAEAPQLPESVRTYDSNGHVSSAKVAWDAIRPEQYAKEGVFTVNGRLEGTQLTTKLHVRVSAQTEQGANISDQWTGSELPLAFASDSNPSDPVSNVNDKLISYNNQPANRWTNWNRTNPEASVGVLFGDSGILSKRSVDNLSVGFHEDHGVGVPKSYVIEYYVGKTVPTAPKNPSFVGNEDHVFNDSANWKPVTNLKAPAQLKAGEMNHFSFDKVETYAVRIRMVKADNKRGTSITEVQIFAKQVAAAKQGQTRIQVDGKDLANFNPDLTDYYLESVDGKVPAVTASVSNNGLATVVPSVREGEPVRVIAKAENGDILGEYRLHFTKDKSLLSHKPVAAVKQARLLQVGQALELPTKVPVYFTGKDGYETKDLTVEWEEVPAENLTKAGQFTVRGRVLGSNLVAEITVRVTDKLGETLSDNPNYDENSNQAFASATNDIDKNSHDRVDYLNDGDHSENRRWTNWSPTPSSNPEVSAGVIFRENGKIVERTVTQGKVQFFADSGTDAPSKLVLERYVGPEFEVPTYYSNYQAYDADHPFNNPENWEAVPYRADKDIAAGDEINVTFKAIKAKAMRWRMERKADKSGVAMIEMTFLAPSELPQESTQSKILVDGKELADFAENRQDYQITYKGQRPKVSVEENNQVASTVVDSGEDSFPVLVRLVSESGKQVKEYRIHLTKEKPVSEKTVAAVQEDLPKIEFVEKDLAYKTVEKKDSTLYLGETRVEQEGKVGKERIFTAINPDGSKEEKLREVVEVPTDRIVLVGTKPVAQEAKKPQVSEKADTKPIDSSEASQTNKAQAAALEHHHHHH

SEQ ID NO: 205 - protein, 555 aa, Artificial Sequence
  Hybrid polypeptide
MVSAQESSTYTVKEGDTLSEIAETHNTTVEKLAENNHIDNIHLIYVDQELVIDGPVAPVATPAPATYAAPAAQDETVSAPVAETPVVSETVVSTVSGSEAEAKEWIAQKESGGSYTATNGRYIGRYQLTDSYLNGDYSAENQERVADAYVAGRYGSWTAAKNFWLNNGWYGSGSGGGGAETTDDKIAAQDNKISNLTAQQQEAQKQVDQIQEQVSAIQAEQSNLQAENDRLQAESKKLEGEITELSKNIVSRNQSLEKQARSAQTNGAVTSYINTIVNSKSITEAISRVAAMSEIVSANNKMLEQQKADKKAISEKQVANNDAINTVIANQQKLADDAQALTTKQAELKAAELSLAAEKATAEGEKASLLEQKAAAEAEARAAAVAEAAYKEKRASQQQSVLASANTNLTAQVQAVSESAAAPVRAKVRPTYSTNASSYPIGECTWGVKTLAPWAGDYWGNGAQWATSAAAAGFRTGSTPQVGAIACWNDGGYGHVAVVTAVESTTRIQVSESNYAGNRTIGNHRGWFNPTTTSEGFVTYIYADAAALEHHHHHH

SEQ ID NO: 206 - protein, 1433 aa, Artificial Sequence
  Hybrid polypeptide
MVSAQESSTYTVKEGDTLSEIAETHNTTVEKLAENNHIDNIHLIYVDQELVIDGPVAPVATPAPATYAAPAAQDETVSAPVAETPVVSETVVSTVSGSEAEAKEWIAQKESGGSYTATNGRYIGRYQLTDSYLNGDYSAENQERVADAYVAGRYGSWTAAKNFWLNNGWYGSGSGGGGADGVTPTTTENQPTIHTVSDSPQSSENRTEETPKAVLQPEAPKTVETETPATDKVASLPKTEEKPQEEVSSTPSDKAEVVTPTSAEKETANKKAEEASPKKEEAKEVDSKESNTDKTDKDKPAKKDEAKAEADKPATEAGKERAATVNEKLAKKKIVSIDAGRKYFSPEQLKEIIDKAKHYGYTDLHLLVGNDGLRFMLDDMSITANGKTYASDDVKRAIEKGTNDYYNDPNGNHLTESQMTDLINYAKDKGIGLIPTVNSPGHMDAILNAMKELGIQNPNFSYFGKKSARTVDLDNEQAVAFTKALIDKYAAYFAKKTEIFNIGLDEYANDATDAKGWSVLQADKYYPNEGYPVKGYEKFIAYANDLARIVKSHGLKPMAFNDGIYYNSDTSFGSFDKDIIVSMWTGGWGGYDVASSKLLAEKGHQILNTNDAWYYVLGRNADGQGWYNLDQGLNGIKNTPITSVPKTEGADIPIIGGMVAAWADTPSARYSPSRLFKLMRHFANANAEYFAADYESAEQALNEVPKDLNRYTAESVTAVKEAEKAIRSLDSNLSRAQQDTIDQAIAKLQETVNNLTLTPEAQKEEEAKREVEKLAKNKVISIDAGRKYFTLNQLKRIVDKASELGYSDVHLLLGNDGLRFLLDDMTITANGKTYASDDVKKAIIEGTKAYYDDPNGTALTQAEVTELIEYAKSKDIGLIPAINSPGHMDAMLVAMEKLGIKNPQAHFDKVSKTTMDLKNEEAMNFVKALIGKYMDFFAGKTKIFNFGTDEYANDATSAQGWYYLKWYQLYGKFAEYANTLAAMAKERGLQPMAFNDGFYYEDKDDVQFDKDVLISYWSKGWWGYNLASPQYLASKGYKFLNTNGDWYYILGQKPEDGGGFLKKAIENTGKTPFNQLASTKYPEVDLPTVGSMLSIWADRPSAEYKEEEIFELMTAFADHNKDYFRANYNALREELAKIPTNLEGYSKESLEALDAAKTALNYNLNRNKQAELDTLVANLKAALQGLKPAVTHSGSLDENEVAANVETRPELITRTEEIPFEVIKKENPNLPAGQENIITAGVKGERTHYISVLTENGKTTETVLDSQVTKEVINQVVEVGAPVTHKGDESGLAPTTEVKPRLDIQEEEIPFTTVTCENPLLLKGKTQVITKGVNGHRSNFYSVSTSADGKEVKTLVNSVVAQEAVTQIVEVGTMVTHVGDENGQAAIAEEKPKLEIPSQPAPSTAPAEESKVLPQDPAPVVTEKKLEHHHHHH

SEQ ID NO: 207 - protein, 1010 aa, Artificial Sequence
  Hybrid polypeptide
MVSAQESSTYTVKEGDTLSEIAETHNTTVEKLAENNHIDNIHLIYVDQELVIDGPVAPVATPAPATYAAPAAQDETVSAPVAETPVVSETVVSTVSGSEAEAKEWIAQKESGGSYTATNGRYIGRYQLTDSYLNGDYSAENQERVADAYVAGRYGSWTAAKNFWLNNGWYGSGSGGGGETPETSPAIGKVVIKETGEGGALLGDAVFELKNNTDGTTVSQRTEAQTGEAIFSNIKPGTYTLTEAQPPVGYKPSTKQWTVEVEKNGRTTVQGEQVENREEALSDQYPQTGTYPDVQTPYQIIKVDGSEKNGQHKALNPNPYERVIPEGTLSKRIYQVNNLDDNQYGIELTVSGKTVYEQKDKSVPLDVVILLDNSNSMSNIRNKNARRAERAGEATRSLIDKITSDSENRVALVTYASTIFDGTEFTVEKGVADKNGKRLNDSLFWNYDQTSFTTNTKDYSYLKLTNDKNDIVELKNKVPTEAEDHDGNRLMYQFGATFTQKALMKADEILTQQARQNSQKVIFHITDGVPTMSYPINFNHATFAPSYQNQLNAFFSKSPNKDGILLSDFITQATSGEHTIVRGDGQSYQMFTDKTVYEKGAPAAFPVKPEKYSEMKAAGYAVIGDPINGGYIWLNWRESILAYPFNSNTAKITNHGDPTRWYYNGNIAPDGYDVFTVGIGINGDPGTDEATATSFMQSISSKPENYTNVTDTTKILEQLNRYFHTIVTEKKSIENGTITDPMGELIDLQLGTDGRFDPADYTLTANDGSRLENGQAVGGPQNDGGLLKNAKVLYDTTEKRIRVTGLYLGTDEKVTLTYNVRLNDEFVSNKFYDTNGRTTLHPKEVEQNTVRDFPIPKIRDVRKYPEITISKEKKLGDIEFIKVNKNDKKPLRGAVFSLQKQHPDYPDIYGAIDQNGTYQNVRTGEDGKLTFKNLSDGKYRLFENSEPAGYKPVQNKPIVAFQIVNGEVRDVTSIVPQDIPAGYEFTNDKHYITNEPIPPKRELEHHHHHH

SEQ ID NO: 208 - protein, 2342 aa, Artificial Sequence
  Hybrid polypeptide
MVSAQESSTYTVKEGDTLSEIAETHNTTVEKLAENNHIDNIHLIYVDQELVIDGPVAPVATPAPATYAAPAAQDETVSAPVAETPVVSETVVSTVSGSEAEAKEWIAQKESGGSYTATNGRYIGRYQLTDSYLNGDYSAENQERVADAYVAGRYGSWTAAKNFWLNNGWYGSGSGGGGDETLITHTAEKPKEEKMIVEEKADKALETKNIVERTEQSEPSSTEAIASEKKEDEAVTPKEEKVSAKPEEKAPRIESQASNQEKPLKEDAKAVTNEEVNQMIEDRKVDFNQNWYFKLNANSKEAIKPDADVSTWKKLDLPYDWSIFNDFDHESPAQNEGGQLNGGEAWYRKTFKLDEKDLKKNVRLTFDGVYMDSQVYVNGQLVGHYPNGYNQFSYDITKYLQKDGRENVIAVHAVNKQPSSRWYSGSGIYRDVTLQVTDKVHVEKNGTTILTPKLEEQQHGKVETHVTSKIVNTDDKDHELVAEYQIVERGGHAVTGLVRTASRTLKAHESTSLDAILEVERPKLWTVLNDKPALYELITRVYRDGQLVDAKKDLFGYRYYHWTPNEGFSLNGERIKFHGVSLHHDHGALGAEENYKAEYRRLKQMKEMGVNSIRTTHNPASEQTLQIAAELGLLVQEEAFDTWYGGKKPYDYGRFFEKDATHPEARKGEKWSDFDLRTMVERGKNNPAIFMWSIGNEIGEANGDAHSLATVKRLVKVIKDVDKTRYVTMGADKFRFGNGSGGHEKIADELDAVGFNYSEDNYKALRAKHPKWLIYGSETSSATRTRGSYYRPERELKHSNGPERNYEQSDYGNDRVGWGKTATASWTFDRDNAGYAGQFIWTGTDYIGEPTPWHNQNQTPVKSSYFGIVDTAGIPKHDFYLYQSQWVSVKKKPMVHLLPHWNWENKELASKVADSEGKIPVRAYSNASSVELFLNGKSLGLKTFNKKQTSDGRTYQEGANANELYLEWKVAYQPGTLEAIARDESGKEIARDKITTAGKPAAVRLIKEDHAIAADGKDLTYIYYEIVDSQGNVVPTANNLVRFQLHGQGQLVGVDNGEQASRERYKAQADGSWIRKAFNGKGVAIVKSTEQAGKFTLTAHSDLLKSNQVTVFTGKKEGQEKTVLGTEVPKVQTIIGEAPEMPTTVPFVYSDGSRAERPVTWSSVDVSKPGIVTVKGMADGREVEARVEVIALKSELPVVKRIAPNTDLNSVDKSVSYVLIDGSVEEYEVDKWEIAEEDKAKLAIPGSRIQATGYLEGQPIHATLVVEEGNPAAPAVPTVTVGGEAVTGLTSQKPMQYRTLAYGAKLPEVTASAKNAAVTVLQASAANGMRASIFIQPKDGGPLQTYAIQFLEEAPKIAHLSLQVEKADSLKEDQTVKLSVRAHYQDGTQAVLPADKVTFSTSGEGEVAIRKGMLELHKPGAVTLNAEYEGAKDQVELTIQANTEKKIAQSIRPVNVVTDLHQEPSLPATVTVEYDKGFPKTHKVTWQAIPKEKLDSYQTFEVLGKVEGIDLEARAKVSVEGIVSVEEVSVTTPIAEAPQLPESVRTYDSNGHVSSAKVAWDAIRPEQYAKEGVFTVNGRLEGTQLTTKLHVRVSAQTEQGANISDQWTGSELPLAFASDSNPSDPVSNVNDKLISYNNQPANRWTNWNRTNPEASVGVLFGDSGILSKRSVDNLSVGFHEDHGVGVPKSYVIEYYVGKTVPTAPKNPSFVGNEDHVFNDSANWKPVTNLKAPAQLKAGEMNHFSFDKVETYAVRIRMVKADNKRGTSITEVQIFAKQVAAAKQGQTRIQVDGKDLANFNPDLTDYYLESVDGKVPAVTASVSNNGLATVVPSVREGEPVRVIAKAENGDILGEYRLHFTKDKSLLSHKPVAAVKQARLLQVGQALELPTKVPVYFTGKDGYETKDLTVEWEEVPAENLTKAGQFTVRGRVLGSNLVAEITVRVTDKLGETLSDNPNYDENSNQAFASATNDIDKNSHDRVDYLNDGDHSENRRWTNWSPTPSSNPEVSAGVIFRENGKIVERTVTQGKVQFFADSGTDAPSKLVLERYVGPEFEVPTYYSNYQAYDADHPFNNPENWEAVPYRADKDIAAGDEINVTFKAIKAKAMRWRMERKADKSGVAMIEMTFLAPSELPQESTQSKILVDGKELADFAENRQDYQITYKGQRPKVSVEENNQVASTVVDSGEDSFPVLVRLVSESGKQVKEYRIHLTKEKPVSEKTVAAVQEDLPKIEFVEKDLAYKTVEKKDSTLYLGETRVEQEGKVGKERIFTAINPDGSKEEKLREVVEVPTDRIVLVGTKPVAQEAKKPQVSEKADTKPIDSSEASQTNKAQAAALEHHHHHH

SEQ ID NO: 209 - protein, 1252 aa, Artificial Sequence
  Hybrid polypeptide
MVSAQESSTYTVKEGDTLSEIAETHNTTVEKLAENNHIDNIHLIYVDQELVIDGPVAPVATPAPATYAAPAAQDETVSAPVAETPVVSETVVSTVSGSEAEAKEWIAQKESGGSYTATNGRYIGRYQLTDSYLNGDYSAENQERVADAYVAGRYGSWTAAKNFWLNNGWYGSGSGGGGDETLITHTAEKPKEEKMIVEEKADKALETKNIVERTEQSEPSSTEAIASEKKEDEAVTPKEEKVSAKPEEKAPRIESQASNQEKPLKEDAKAVTNEEVNQMIEDRKVDFNQNWYFKLNANSKEAIKPDADVSTWKKLDLPYDWSIFNDFDHESPAQNEGGQLNGGEAWYRKTFKLDEKDLKKNVRLTFDGVYMDSQVYVNGQLVGHYPNGYNQFSYDITKYLQKDGRENVIAVHAVNKQPSSRWYSGSGIYRDVTLQVTDKVHVEKNGTTILTPKLEEQQHGKVETHVTSKIVNTDDKDHELVAEYQIVERGGHAVTGLVRTASRTLKAHESTSLDAILEVERPKLWTVLNDKPALYELITRVYRDGQLVDAKKDLFGYRYYHWTPNEGFSLNGERIKFHGVSLHHDHGALGAEENYKAEYRRLKQMKEMGVNSIRTTHNPASEQTLQIAAELGLLVQEEAFDTWYGGKKPYDYGRFFEKDATHPEARKGEKWSDFDLRTMVERGKNNPAIFMWSIGNEIGEANGDAHSLATVKRLVKVIKDVDKTRYVTMGADKFRFGNGSGGHEKIADELDAVGFNYSEDNYKALRAKHPKWLIYGSETSSATRTRGSYYRPERELKHSNGPERNYEQSDYGNDRVGWGKTATASWTFDRDNAGYAGQFIWTGTDYIGEPTPWHNQNQTPVKSSYFGIVDTAGIPKHDFYLYQSQWVSVKKKPMVHLLPHWNWENKELASKVADSEGKIPVRAYSNASSVELFLNGKSLGLKTFNKKQTSDGRTYQEGANANELYLEWKVAYQPGTLEAIARDESGKEIARDKITTAGKPAAVRLIKEDHAIAADGKDLTYIYYEIVDSQGNVVPTANNLVRFQLHGQGQLVGVDNGEQASRERYKAQADGSWIRKAFNGKGVAIVKSTEQAGKFTLTAHSDLLKSNQVTVFTGKKEGQEKTVLGTEVPKVQTIIGEAPEMPTTVPFVYSDGSRAERPVTWSSVDVSKPGIVTVKGMADGREVEARVEVIALKSELPVVKRIAPNTDLNSVDKSVSYVLIDGSVEEYEVDKWEIAEEDKAKAAALEHHHHHH

SEQ ID NO: 210 - protein, 1287 aa, Artificial Sequence
  Hybrid polypeptide
MVSAQESSTYTVKEGDTLSEIAETHNTTVEKLAENNHIDNIHLIYVDQELVIDGPVAPVATPAPATYAAPAAQDETVSAPVAETPVVSETVVSTVSGSEAEAKEWIAQKESGGSYTATNGRYIGRYQLTDSYLNGDYSAENQERVADAYVAGRYGSWTAAKNFWLNNGWYGSGSGGGGIAEEDKAKLAIPGSRIQATGYLEGQPIHATLVVEEGNPAAPAVPTVTVGGEAVTGLTSQKPMQYRTLAYGAKLPEVTASAKNAAVTVLQASAANGMRASIFIQPKDGGPLQTYAIQFLEEAPKIAHLSLQVEKADSLKEDQTVKLSVRAHYQDGTQAVLPADKVTFSTSGEGEVAIRKGMLELHKPGAVTLNAEYEGAKDQVELTIQANTEKKIAQSIRPVNVVTDLHQEPSLPATVTVEYDKGFPKTHKVTWQAIPKEKLDSYQTFEVLGKVEGIDLEARAKVSVEGIVSVEEVSVTTPIAEAPQLPESVRTYDSNGHVSSAKVAWDAIRPEQYAKEGVFTVNGRLEGTQLTTKLHVRVSAQTEQGANISDQWTGSELPLAFASDSNPSDPVSNVNDKLISYNNQPANRWTNWNRTNPEASVGVLFGDSGILSKRSVDNLSVGFHEDHGVGVPKSYVIEYYVGKTVPTAPKNPSFVGNEDHVFNDSANWKPVTNLKAPAQLKAGEMNHFSFDKVETYAVRIRMVKADNKRGTSITEVQIFAKQVAAAKQGQTRIQVDGKDLANFNPDLTDYYLESVDGKVPAVTASVSNNGLATVVPSVREGEPVRVIAKAENGDILGEYRLHFTKDKSLLSHKPVAAVKQARLLQVGQALELPTKVPVYFTGKDGYETKDLTVEWEEVPAENLTKAGQFTVRGRVLGSNLVAEITVRVTDKLGETLSDNPNYDENSNQAFASATNDIDKNSHDRVDYLNDGDHSENRRWTNWSPTPSSNPEVSAGVIFRENGKIVERTVTQGKVQFFADSGTDAPSKLVLERYVGPEFEVPTYYSNYQAYDADHPFNNPENWEAVPYRADKDIAAGDEINVTFKAIKAKAMRWRMERKADKSGVAMIEMTFLAPSELPQESTQSKILVDGKELADFAENRQDYQITYKGQRPKVSVEENNQVASTVVDSGEDSFPVLVRLVSESGKQVKEYRIHLTKEKPVSEKTVAAVQEDLPKIEFVEKDLAYKTVEKKDSTLYLGETRVEQEGKVGKERIFTAINPDGSKEEKLREVVEVPTDRIVLVGTKPVAQEAKKPQVSEKADTKPIDSSEASQTNKAQAAALEHHHHHH

SEQ ID NO: 211 - protein, 1212 aa, Artificial Sequence
  Hybrid polypeptide
MASETPETSPAIGKVVIKETGEGGALLGDAVFELKNNTDGTTVSQRTEAQTGEAIFSNIKPGTYTLTEAQPPVGYKPSTKQWTVEVEKNGRTTVQGEQVENREEALSDQYPQTGTYPDVQTPYQIIKVDGSEKNGQHKALNPNPYERVIPEGTLSKRIYQVNNLDDNQYGIELTVSGKTVYEQKDKSVPLDVVILLDNSNSMSNIRNKNARRAERAGEATRSLIDKITSDSENRVALVTYASTIFDGTEFTVEKGVADKNGKRLNDSLFWNYDQTSFTTNTKDYSYLKLTNDKNDIVELKNKVPTEAEDHDGNRLMYQFGATFTQKALMKADEILTQQARQNSQKVIFHITDGVPTMSYPINFNHATFAPSYQNQLNAFFSKSPNKDGILLSDFITQATSGEHTIVRGDGQSYQMFTDKTVYEKGAPAAFPVKPEKYSEMKAAGYAVIGDPINGGYIWLNWRESILAYPFNSNTAKITNHGDPTRWYYNGNIAPDGYDVFTVGIGINGDPGTDEATATSFMQSISSKPENYTNVTDTTKILEQLNRYFHTIVTEKKSIENGTITDPMGELIDLQLGTDGRFDPADYTLTANDGSRLENGQAVGGPQNDGGLLKNAKVLYDTTEKRIRVTGLYLGTDEKVTLTYNVRLNDEFVSNKFYDTNGRTTLHPKEVEQNTVRDFPIPKIRDVRKYPEITISKEKKLGDIEFIKVNKNDKKPLRGAVFSLQKQHPDYPDIYGAIDQNGTYQNVRTGEDGKLTFKNLSDGKYRLFENSEPAGYKPVQNKPIVAFQIVNGEVRDVTSIVPQDIPAGYEFTNDKHYITNEPIPPKREGSGSGGGGAETTDDKIAAQDNKISNLTAQQQEAQKQVDQIQEQVSAIQAEQSNLQAENDRLQAESKKLEGEITELSKNIVSRNQSLEKQARSAQTNGAVTSYINTIVNSKSITEAISRVAAMSEIVSANNKMLEQQKADKKAISEKQVANNDAINTVIANQQKLADDAQALTTKQAELKAAELSLAAEKATAEGEKASLLEQKAAAEAEARAAAVAEAAYKEKRASQQQSVLASANTNLTAQVQAVSESAAAPVRAKVRPTYSTNASSYPIGECTWGVKTLAPWAGDYWGNGAQWATSAAAAGFRTGSTPQVGAIACWNDGGYGHVAVVTAVESTTRIQVSESNYAGNRTIGNHRGWFNPTTTSEGFVTYIYADAAALEHHHHHH

SEQ ID NO: 212 - protein, 2999 aa, Artificial Sequence
  Hybrid polypeptide
MASETPETSPAIGKVVIKETGEGGALLGDAVFELKNNTDGTTVSQRTEAQTGEAIFSNIKPGTYTLTEAQPPVGYKPSTKQWTVEVEKNGRTTVQGEQVENREEALSDQYPQTGTYPDVQTPYQIIKVDGSEKNGQHKALNPNPYERVIPEGTLSKRIYQVNNLDDNQYGIELTVSGKTVYEQKDKSVPLDVVILLDNSNSMSNIRNKNARRAERAGEATRSLIDKITSDSENRVALVTYASTIFDGTEFTVEKGVADKNGKRLNDSLFWNYDQTSFTTNTKDYSYLKLTNDKNDIVELKNKVPTEAEDHDGNRLMYQFGATFTQKALMKADEILTQQARQNSQKVIFHITDGVPTMSYPINFNHATFAPSYQNQLNAFFSKSPNKDGILLSDFITQATSGEHTIVRGDGQSYQMFTDKTVYEKGAPAAFPVKPEKYSEMKAAGYAVIGDPINGGYIWLNWRESILAYPFNSNTAKITNHGDPTRWYYNGNIAPDGYDVFTVGIGINGDPGTDEATATSFMQSISSKPENYTNVTDTTKILEQLNRYFHTIVTEKKSIENGTITDPMGELIDLQLGTDGRFDPADYTLTANDGSRLENGQAVGGPQNDGGLLKNAKVLYDTTEKRIRVTGLYLGTDEKVTLTYNVRLNDEFVSNKFYDTNGRTTLHPKEVEQNTVRDFPIPKIRDVRKYPEITISKEKKLGDIEFIKVNKNDKKPLRGAVFSLQKQHPDYPDIYGAIDQNGTYQNVRTGEDGKLTFKNLSDGKYRLFENSEPAGYKPVQNKPIVAFQIVNGEVRDVTSIVPQDIPAGYEFTNDKHYITNEPIPPKREGSGSGGGGDETLITHTAEKPKEEKMIVEEKADKALETKNIVERTEQSEPSSTEAIASEKKEDEAVTPKEEKVSAKPEEKAPRIESQASNQEKPLKEDAKAVTNEEVNQMIEDRKVDFNQNWYFKLNANSKEAIKPDADVSTWKKLDLPYDWSIFNDFDHESPAQNEGGQLNGGEAWYRKTFKLDEKDLKKNVRLTFDGVYMDSQVYVNGQLVGHYPNGYNQFSYDITKYLQKDGRENVIAVHAVNKQPSSRWYSGSGIYRDVTLQVTDKVHVEKNGTTILTPKLEEQQHGKVETHVTSKIVNTDDKDHELVAEYQIVERGGHAVTGLVRTASRTLKAHESTSLDAILEVERPKLWTVLNDKPALYELITRVYRDGQLVDAKKDLFGYRYYHWTPNEGFSLNGERIKFHGVSLHHDHGALGAEENYKAEYRRLKQMKEMGVNSIRTTHNPASEQTLQIAAELGLLVQEEAFDTWYGGKKPYDYGRFFEKDATHPEARKGEKWSDFDLRTMVERGKNNPAIFMWSIGNEIGEANGDAHSLATVKRLVKVIKDVDKTRYVTMGADKFRFGNGSGGHEKIADELDAVGFNYSEDNYKALRAKHPKWLIYGSETSSATRTRGSYYRPERELKHSNGPERNYEQSDYGNDRVGWGKTATASWTFDRDNAGYAGQFIWTGTDYIGEPTPWHNQNQTPVKSSYFGIVDTAGIPKHDFYLYQSQWVSVKKKPMVHLLPHWNWENKELASKVADSEGKIPVRAYSNASSVELFLNGKSLGLKTFNKKQTSDGRTYQEGANANELYLEWKVAYQPGTLEAIARDESGKEIARDKITTAGKPAAVRLIKEDHAIAADGKDLTYIYYEIVDSQGNVVPTANNLVRFQLHGQGQLVGVDNGEQASRERYKAQADGSWIRKAFNGKGVAIVKSTEQAGKFTLTAHSDLLKSNQVTVFTGKKEGQEKTVLGTEVPKVQTIIGEAPEMPTTVPFVYSDGSRAERPVTWSSVDVSKPGIVTVKGMADGREVEARVEVIALKSELPVVKRIAPNTDLNSVDKSVSYVLIDGSVEEYEVDKWEIAEEDKAKLAIPGSRIQATGYLEGQPIHATLVVEEGNPAAPAVPTVTVGGEAVTGLTSQKPMQYRTLAYGAKLPEVTASAKNAAVTVLQASAANGMRASIFIQPKDGGPLQTYAIQFLEEAPKIAHLSLQVEKADSLKEDQTVKLSVRAHYQDGTQAVLPADKVTFSTSGEGEVAIRKGMLELHKPGAVTLNAEYEGAKDQVELTIQANTEKKIAQSIRPVNVVTDLHQEPSLPATVTVEYDKGFPKTHKVTWQAIPKEKLDSYQTFEVLGKVEGIDLEARAKVSVEGIVSVEEVSVTTPIAEAPQLPESVRTYDSNGHVSSAKVAWDAIRPEQYAKEGVFTVNGRLEGTQLTTKLHVRVSAQTEQGANISDQWTGSELPLAFASDSNPSDPVSNVNDKLISYNNQPANRWTNWNRTNPEASVGVLFGDSGILSKRSVDNLSVGFHEDHGVGVPKSYVIEYYVGKTVPTAPKNPSFVGNEDHVFNDSANWKPVTNLKAPAQLKAGEMNHFSFDKVETYAVRIRMVKADNKRGTSITEVQIFAKQVAAAKQGQTRIQVDGKDLANFNPDLTDYYLESVDGKVPAVTASVSNNGLATVVPSVREGEPVRVIAKAENGDILGEYRLHFTKDKSLLSHKPVAAVKQARLLQVGQALELPTKVPVYFTGKDGYETKDLTVEWEEVPAENLTKAGQFTVRGRVLGSNLVAEITVRVTDKLGETLSDNPNYDENSNQAFASATNDIDKNSHDRVDYLNDGDHSENRRWTNWSPTPSSNPEVSAGVIFRENGKIVERTVTQGKVQFFADSGTDAPSKLVLERYVGPEFEVPTYYSNYQAYDADHPFNNPENWEAVPYRADKDIAAGDEINVTFKAIKAKAMRWRMERKADKSGVAMIEMTFLAPSELPQESTQSKILVDGKELADFAENRQDYQITYKGQRPKVSVEENNQVASTVVDSGEDSFPVLVRLVSESGKQVKEYRIHLTKEKPVSEKTVAAVQEDLPKIEFVEKDLAYKTVEKKDSTLYLGETRVEQEGKVGKERIFTAINPDGSKEEKLREVVEVPTDRIVLVGTKPVAQEAKKPQVSEKADTKPIDSSEASQTNKAQAAALEHHHHHH

SEQ ID NO: 213 - protein, 1909 aa, Artificial Sequence
  Hybrid polypeptide
MASETPETSPAIGKVVIKETGEGGALLGDAVFELKNNTDGTTVSQRTEAQTGEAIFSNIKPGTYTLTEAQPPVGYKPSTKQWTVEVEKNGRTTVQGEQVENREEALSDQYPQTGTYPDVQTPYQIIKVDGSEKNGQHKALNPNPYERVIPEGTLSKRIYQVNNLDDNQYGIELTVSGKTVYEQKDKSVPLDVVILLDNSNSMSNIRNKNARRAERAGEATRSLIDKITSDSENRVALVTYASTIFDGTEFTVEKGVADKNGKRLNDSLFWNYDQTSFTTNTKDYSYLKLTNDKNDIVELKNKVPTEAEDHDGNRLMYQFGATFTQKALMKADEILTQQARQNSQKVIFHITDGVPTMSYPINFNHATFAPSYQNQLNAFFSKSPNKDGILLSDFITQATSGEHTIVRGDGQSYQMFTDKTVYEKGAPAAFPVKPEKYSEMKAAGYAVIGDPINGGYIWLNWRESILAYPFNSNTAKITNHGDPTRWYYNGNIAPDGYDVFTVGIGINGDPGTDEATATSFMQSISSKPENYTNVTDTTKILEQLNRYFHTIVTEKKSIENGTITDPMGELIDLQLGTDGRFDPADYTLTANDGSRLENGQAVGGPQNDGGLLKNAKVLYDTTEKRIRVTGLYLGTDEKVTLTYNVRLNDEFVSNKFYDTNGRTTLHPKEVEQNTVRDFPIPKIRDVRKYPEITISKEKKLGDIEFIKVNKNDKKPLRGAVFSLQKQHPDYPDIYGAIDQNGTYQNVRTGEDGKLTFKNLSDGKYRLFENSEPAGYKPVQNKPIVAFQIVNGEVRDVTSIVPQDIPAGYEFTNDKHYITNEPIPPKREGSGSGGGGDETLITHTAEKPKEEKMIVEEKADKALETKNIVERTEQSEPSSTEAIASEKKEDEAVTPKEEKVSAKPEEKAPRIESQASNQEKPLKEDAKAVTNEEVNQMIEDRKVDFNQNWYFKLNANSKEAIKPDADVSTWKKLDLPYDWSIFNDFDHESPAQNEGGQLNGGEAWYRKTFKLDEKDLKKNVRLTFDGVYMDSQVYVNGQLVGHYPNGYNQFSYDITKYLQKDGRENVIAVHAVNKQPSSRWYSGSGIYRDVTLQVTDKVHVEKNGTTILTPKLEEQQHGKVETHVTSKIVNTDDKDHELVAEYQIVERGGHAVTGLVRTASRTLKAHESTSLDAILEVERPKLWTVLNDKPALYELITRVYRDGQLVDAKKDLFGYRYYHWTPNEGFSLNGERIKFHGVSLHHDHGALGAEENYKAEYRRLKQMKEMGVNSIRTTHNPASEQTLQIAAELGLLVQEEAFDTWYGGKKPYDYGRFFEKDATHPEARKGEKWSDFDLRTMVERGKNNPAIFMWSIGNEIGEANGDAHSLATVKRLVKVIKDVDKTRYVTMGADKFRFGNGSGGHEKIADELDAVGFNYSEDNYKALRAKHPKWLIYGSETSSATRTRGSYYRPERELKHSNGPERNYEQSDYGNDRVGWGKTATASWTFDRDNAGYAGQFIWTGTDYIGEPTPWHNQNQTPVKSSYFGIVDTAGIPKHDFYLYQSQWVSVKKKPMVHLLPHWNWENKELASKVADSEGKIPVRAYSNASSVELFLNGKSLGLKTFNKKQTSDGRTYQEGANANELYLEWKVAYQPGTLEAIARDESGKEIARDKITTAGKPAAVRLIKEDHAIAADGKDLTYIYYEIVDSQGNVVPTANNLVRFQLHGQGQLVGVDNGEQASRERYKAQADGSWIRKAFNGKGVAIVKSTEQAGKFTLTAHSDLLKSNQVTVFTGKKEGQEKTVLGTEVPKVQTIIGEAPEMPTTVPFVYSDGSRAERPVTWSSVDVSKPGIVTVKGMADGREVEARVEVIALKSELPVVKRIAPNTDLNSVDKSVSYVLIDGSVEEYEVDKWEIAEEDKAKAAALEHHHHHH

SEQ ID NO: 214 - protein, 1944 aa, Artificial Sequence
  Hybrid polypeptide
MASETPETSPAIGKVVIKETGEGGALLGDAVFELKNNTDGTTVSQRTEAQTGEAIFSNIKPGTYTLTEAQPPVGYKPSTKQWTVEVEKNGRTTVQGEQVENREEALSDQYPQTGTYPDVQTPYQIIKVDGSEKNGQHKALNPNPYERVIPEGTLSKRIYQVNNLDDNQYGIELTVSGKTVYEQKDKSVPLDVVILLDNSNSMSNIRNKNARRAERAGEATRSLIDKITSDSENRVALVTYASTIFDGTEFTVEKGVADKNGKRLNDSLFWNYDQTSFTTNTKDYSYLKLTNDKNDIVELKNKVPTEAEDHDGNRLMYQFGATFTQKALMKADEILTQQARQNSQKVIFHITDGVPTMSYPINFNHATFAPSYQNQLNAFFSKSPNKDGILLSDFITQATSGEHTIVRGDGQSYQMFTDKTVYEKGAPAAFPVKPEKYSEMKAAGYAVIGDPINGGYIWLNWRESILAYPFNSNTAKITNHGDPTRWYYNGNIAPDGYDVFTVGIGINGDPGTDEATATSFMQSISSKPENYTNVTDTTKILEQLNRYFHTIVTEKKSIENGTITDPMGELIDLQLGTDGRFDPADYTLTANDGSRLENGQAVGGPQNDGGLLKNAKVLYDTTEKRIRVTGLYLGTDEKVTLTYNVRLNDEFVSNKFYDTNGRTTLHPKEVEQNTVRDFPIPKIRDVRKYPEITISKEKKLGDIEFIKVNKNDKKPLRGAVFSLQKQHPDYPDIYGAIDQNGTYQNVRTGEDGKLTFKNLSDGKYRLFENSEPAGYKPVQNKPIVAFQIVNGEVRDVTSIVPQDIPAGYEFTNDKHYITNEPIPPKREGSGSGGGGIAEEDKAKLAIPGSRIQATGYLEGQPIHATLVVEEGNPAAPAVPTVTVGGEAVTGLTSQKPMQYRTLAYGAKLPEVTASAKNAAVTVLQASAANGMRASIFIQPKDGGPLQTYAIQFLEEAPKIAHLSLQVEKADSLKEDQTVKLSVRAHYQDGTQAVLPADKVTFSTSGEGEVAIRKGMLELHKPGAVTLNAEYEGAKDQVELTIQANTEKKIAQSIRPVNVVTDLHQEPSLPATVTVEYDKGFPKTHKVTWQAIPKEKLDSYQTFEVLGKVEGIDLEARAKVSVEGIVSVEEVSVTTPIAEAPQLPESVRTYDSNGHVSSAKVAWDAIRPEQYAKEGVFTVNGRLEGTQLTTKLHVRVSAQTEQGANISDQWTGSELPLAFASDSNPSDPVSNVNDKLISYNNQPANRWTNWNRTNPEASVGVLFGDSGILSKRSVDNLSVGFHEDHGVGVPKSYVIEYYVGKTVPTAPKNPSFVGNEDHVFNDSANWKPVTNLKAPAQLKAGEMNHFSFDKVETYAVRIRMVKADNKRGTSITEVQIFAKQVAAAKQGQTRIQVDGKDLANFNPDLTDYYLESVDGKVPAVTASVSNNGLATVVPSVREGEPVRVIAKAENGDILGEYRLHFTKDKSLLSHKPVAAVKQARLLQVGQALELPTKVPVYFTGKDGYETKDLTVEWEEVPAENLTKAGQFTVRGRVLGSNLVAEITVRVTDKLGETLSDNPNYDENSNQAFASATNDIDKNSHDRVDYLNDGDHSENRRWTNWSPTPSSNPEVSAGVIFRENGKIVERTVTQGKVQFFADSGTDAPSKLVLERYVGPEFEVPTYYSNYQAYDADHPFNNPENWEAVPYRADKDIAAGDEINVTFKAIKAKAMRWRMERKADKSGVAMIEMTFLAPSELPQESTQSKILVDGKELADFAENRQDYQITYKGQRPKVSVEENNQVASTVVDSGEDSFPVLVRLVSESGKQVKEYRIHLTKEKPVSEKTVAAVQEDLPKIEFVEKDLAYKTVEKKDSTLYLGETRVEQEGKVGKERIFTAINPDGSKEEKLREVVEVPTDRIVLVGTKPVAQEAKKPQVSEKADTKPIDSSEASQTNKAQAAALEHHHHHH

SEQ ID NO: 215 - protein, 2090 aa, Artificial Sequence
  Hybrid polypeptide
MASETPETSPAIGKVVIKETGEGGALLGDAVFELKNNTDGTTVSQRTEAQTGEAIFSNIKPGTYTLTEAQPPVGYKPSTKQWTVEVEKNGRTTVQGEQVENREEALSDQYPQTGTYPDVQTPYQIIKVDGSEKNGQHKALNPNPYERVIPEGTLSKRIYQVNNLDDNQYGIELTVSGKTVYEQKDKSVPLDVVILLDNSNSMSNIRNKNARRAERAGEATRSLIDKITSDSENRVALVTYASTIFDGTEFTVEKGVADKNGKRLNDSLFWNYDQTSFTTNTKDYSYLKLTNDKNDIVELKNKVPTEAEDHDGNRLMYQFGATFTQKALMKADEILTQQARQNSQKVIFHITDGVPTMSYPINFNHATFAPSYQNQLNAFFSKSPNKDGILLSDFITQATSGEHTIVRGDGQSYQMFTDKTVYEKGAPAAFPVKPEKYSEMKAAGYAVIGDPINGGYIWLNWRESILAYPFNSNTAKITNHGDPTRWYYNGNIAPDGYDVFTVGIGINGDPGTDEATATSFMQSISSKPENYTNVTDTTKILEQLNRYFHTIVTEKKSIENGTITDPMGELIDLQLGTDGRFDPADYTLTANDGSRLENGQAVGGPQNDGGLLKNAKVLYDTTEKRIRVTGLYLGTDEKVTLTYNVRLNDEFVSNKFYDTNGRTTLHPKEVEQNTVRDFPIPKIRDVRKYPEITISKEKKLGDIEFIKVNKNDKKPLRGAVFSLQKQHPDYPDIYGAIDQNGTYQNVRTGEDGKLTFKNLSDGKYRLFENSEPAGYKPVQNKPIVAFQIVNGEVRDVTSIVPQDIPAGYEFTNDKHYITNEPIPPKREGSGSGGGGADGVTPTTTENQPTIHTVSDSPQSSENRTEETPKAVLQPEAPKTVETETPATDKVASLPKTEEKPQEEVSSTPSDKAEVVTPTSAEKETANKKAEEASPKKEEAKEVDSKESNTDKTDKDKPAKKDEAKAEADKPATEAGKERAATVNEKLAKKKIVSIDAGRKYFSPEQLKEIIDKAKHYGYTDLHLLVGNDGLRFMLDDMSITANGKTYASDDVKRAIEKGTNDYYNDPNGNHLTESQMTDLINYAKDKGIGLIPTVNSPGHMDAILNAMKELGIQNPNFSYFGKKSARTVDLDNEQAVAFTKALIDKYAAYFAKKTEIFNIGLDEYANDATDAKGWSVLQADKYYPNEGYPVKGYEKFIAYANDLARIVKSHGLKPMAFNDGIYYNSDTSFGSFDKDIIVSMWTGGWGGYDVASSKLLAEKGHQILNTNDAWYYVLGRNADGQGWYNLDQGLNGIKNTPITSVPKTEGADIPIIGGMVAAWADTPSARYSPSRLFKLMRHFANANAEYFAADYESAEQALNEVPKDLNRYTAESVTAVKEAEKAIRSLDSNLSRAQQDTIDQAIAKLQETVNNLTLTPEAQKEEEAKREVEKLAKNKVISIDAGRKYFTLNQLKRIVDKASELGYSDVHLLLGNDGLRFLLDDMTITANGKTYASDDVKKAIIEGTKAYYDDPNGTALTQAEVTELIEYAKSKDIGLIPAINSPGHMDAMLVAMEKLGIKNPQAHFDKVSKTTMDLKNEEAMNFVKALIGKYMDFFAGKTKIFNFGTDEYANDATSAQGWYYLKWYQLYGKFAEYANTLAAMAKERGLQPMAFNDGFYYEDKDDVQFDKDVLISYWSKGWWGYNLASPQYLASKGYKFLNTNGDWYYILGQKPEDGGGFLKKAIENTGKTPFNQLASTKYPEVDLPTVGSMLSIWADRPSAEYKEEEIFELMTAFADHNKDYFRANYNALREELAKIPTNLEGYSKESLEALDAAKTALNYNLNRNKQAELDTLVANLKAALQGLKPAVTHSGSLDENEVAANVETRPELITRTEEIPFEVIKKENPNLPAGQENIITAGVKGERTHYISVLTENGKTTETVLDSQVTKEVINQVVEVGAPVTHKGDESGLAPTTEVKPRLDIQEEEIPFTTVTCENPLLLKGKTQVITKGVNGHRSNFYSVSTSADGKEVKTLVNSVVAQEAVTQIVEVGTMVTHVGDENGQAAIAEEKPKLEIPSQPAPSTAPAEESKVLPQDPAPVVTEKKLEHHHHHH

SEQ ID NO: 216 - protein, 1012 aa, Artificial Sequence
  Hybrid polypeptide
MASETPETSPAIGKVVIKETGEGGALLGDAVFELKNNTDGTTVSQRTEAQTGEAIFSNIKPGTYTLTEAQPPVGYKPSTKQWTVEVEKNGRTTVQGEQVENREEALSDQYPQTGTYPDVQTPYQIIKVDGSEKNGQHKALNPNPYERVIPEGTLSKRIYQVNNLDDNQYGIELTVSGKTVYEQKDKSVPLDVVILLDNSNSMSNIRNKNARRAERAGEATRSLIDKITSDSENRVALVTYASTIFDGTEFTVEKGVADKNGKRLNDSLFWNYDQTSFTTNTKDYSYLKLTNDKNDIVELKNKVPTEAEDHDGNRLMYQFGATFTQKALMKADEILTQQARQNSQKVIFHITDGVPTMSYPINFNHATFAPSYQNQLNAFFSKSPNKDGILLSDFITQATSGEHTIVRGDGQSYQMFTDKTVYEKGAPAAFPVKPEKYSEMKAAGYAVIGDPINGGYIWLNWRESILAYPFNSNTAKITNHGDPTRWYYNGNIAPDGYDVFTVGIGINGDPGTDEATATSFMQSISSKPENYTNVTDTTKILEQLNRYFHTIVTEKKSIENGTITDPMGELIDLQLGTDGRFDPADYTLTANDGSRLENGQAVGGPQNDGGLLKNAKVLYDTTEKRIRVTGLYLGTDEKVTLTYNVRLNDEFVSNKFYDTNGRTTLHPKEVEQNTVRDFPIPKIRDVRKYPEITISKEKKLGDIEFIKVNKNDKKPLRGAVFSLQKQHPDYPDIYGAIDQNGTYQNVRTGEDGKLTFKNLSDGKYRLFENSEPAGYKPVQNKPIVAFQIVNGEVRDVTSIVPQDIPAGYEFTNDKHYITNEPIPPKREGSGSGGGGVSAQESSTYTVKEGDTLSEIAETHNTTVEKLAENNHIDNIHLIYVDQELVIDGPVAPVATPAPATYAAPAAQDETVSAPVAETPVVSETVVSTVSGSEAEAKEWIAQKESGGSYTATNGRYIGRYQLTDSYLNGDYSAENQERVADAYVAGRYGSWTAAKNFWLNNGWYLEHHHHHH

SEQ ID NO: 217 - protein, 3422 aa, Artificial Sequence
  Hybrid polypeptide
MASDETLITHTAEKPKEEKMIVEEKADKALETKNIVERTEQSEPSSTEAIASEKKEDEAVTPKEEKVSAKPEEKAPRIESQASNQEKPLKEDAKAVTNEEVNQMIEDRKVDFNQNWYFKLNANSKEAIKPDADVSTWKKLDLPYDWSIFNDFDHESPAQNEGGQLNGGEAWYRKTFKLDEKDLKKNVRLTFDGVYMDSQVYVNGQLVGHYPNGYNQFSYDITKYLQKDGRENVIAVHAVNKQPSSRWYSGSGIYRDVTLQVTDKVHVEKNGTTILTPKLEEQQHGKVETHVTSKIVNTDDKDHELVAEYQIVERGGHAVTGLVRTASRTLKAHESTSLDAILEVERPKLWTVLNDKPALYELITRVYRDGQLVDAKKDLFGYRYYHWTPNEGFSLNGERIKFHGVSLHHDHGALGAEENYKAEYRRLKQMKEMGVNSIRTTHNPASEQTLQIAAELGLLVQEEAFDTWYGGKKPYDYGRFFEKDATHPEARKGEKWSDFDLRTMVERGKNNPAIFMWSIGNEIGEANGDAHSLATVKRLVKVIKDVDKTRYVTMGADKFRFGNGSGGHEKIADELDAVGFNYSEDNYKALRAKHPKWLIYGSETSSATRTRGSYYRPERELKHSNGPERNYEQSDYGNDRVGWGKTATASWTFDRDNAGYAGQFIWTGTDYIGEPTPWHNQNQTPVKSSYFGIVDTAGIPKHDFYLYQSQWVSVKKKPMVHLLPHWNWENKELASKVADSEGKIPVRAYSNASSVELFLNGKSLGLKTFNKKQTSDGRTYQEGANANELYLEWKVAYQPGTLEAIARDESGKEIARDKITTAGKPAAVRLIKEDHAIAADGKDLTYIYYEIVDSQGNVVPTANNLVRFQLHGQGQLVGVDNGEQASRERYKAQADGSWIRKAFNGKGVAIVKSTEQAGKFTLTAHSDLLKSNQVTVFTGKKEGQEKTVLGTEVPKVQTIIGEAPEMPTTVPFVYSDGSRAERPVTWSSVDVSKPGIVTVKGMADGREVEARVEVIALKSELPVVKRIAPNTDLNSVDKSVSYVLIDGSVEEYEVDKWEIAEEDKAKLAIPGSRIQATGYLEGQPIHATLVVEEGNPAAPAVPTVTVGGEAVTGLTSQKPMQYRTLAYGAKLPEVTASAKNAAVTVLQASAANGMRASIFIQPKDGGPLQTYAIQFLEEAPKIAHLSLQVEKADSLKEDQTVKLSVRAHYQDGTQAVLPADKVTFSTSGEGEVAIRKGMLELHKPGAVTLNAEYEGAKDQVELTIQANTEKKIAQSIRPVNVVTDLHQEPSLPATVTVEYDKGFPKTHKVTWQAIPKEKLDSYQTFEVLGKVEGIDLEARAKVSVEGIVSVEEVSVTTPIAEAPQLPESVRTYDSNGHVSSAKVAWDAIRPEQYAKEGVFTVNGRLEGTQLTTKLHVRVSAQTEQGANISDQWTGSELPLAFASDSNPSDPVSNVNDKLISYNNQPANRWTNWNRTNPEASVGVLFGDSGILSKRSVDNLSVGFHEDHGVGVPKSYVIEYYVGKTVPTAPKNPSFVGNEDHVFNDSANWKPVTNLKAPAQLKAGEMNHFSFDKVETYAVRIRMVKADNKRGTSITEVQIFAKQVAAAKQGQTRIQVDGKDLANFNPDLTDYYLESVDGKVPAVTASVSNNGLATVVPSVREGEPVRVIAKAENGDILGEYRLHFTKDKSLLSHKPVAAVKQARLLQVGQALELPTKVPVYFTGKDGYETKDLTVEWEEVPAENLTKAGQFTVRGRVLGSNLVAEITVRVTDKLGETLSDNPNYDENSNQAFASATNDIDKNSHDRVDYLNDGDHSENRRWTNWSPTPSSNPEVSAGVIFRENGKIVERTVTQGKVQFFADSGTDAPSKLVLERYVGPEFEVPTYYSNYQAYDADHPFNNPENWEAVPYRADKDIAAGDEINVTFKAIKAKAMRWRMERKADKSGVAMIEMTFLAPSELPQESTQSKILVDGKELADFAENRQDYQITYKGQRPKVSVEENNQVASTVVDSGEDSFPVLVRLVSESGKQVKEYRIHLTKEKPVSEKTVAAVQEDLPKIEFVEKDLAYKTVEKKDSTLYLGETRVEQEGKVGKERIFTAINPDGSKEEKLREVVEVPTDRIVLVGTKPVAQEAKKPQVSEKADTKPIDSSEASQTNKAQGSGSGGGGADGVTPTTTENQPTIHTVSDSPQSSENRTEETPKAVLQPEAPKTVETETPATDKVASLPKTEEKPQEEVSSTPSDKAEVVTPTSAEKETANKKAEEASPKKEEAKEVDSKESNTDKTDKDKPAKKDEAKAEADKPATEAGKERAATVNEKLAKKKIVSIDAGRKYFSPEQLKEIIDKAKHYGYTDLHLLVGNDGLRFMLDDMSITANGKTYASDDVKRAIEKGTNDYYNDPNGNHLTESQMTDLINYAKDKGIGLIPTVNSPGHMDAILNAMKELGIQNPNFSYFGKKSARTVDLDNEQAVAFTKALIDKYAAYFAKKTEIFNIGLDEYANDATDAKGWSVLQADKYYPNEGYPVKGYEKFIAYANDLARIVKSHGLKPMAFNDGIYYNSDTSFGSFDKDIIVSMWTGGWGGYDVASSKLLAEKGHQILNTNDAWYYVLGRNADGQGWYNLDQGLNGIKNTPITSVPKTEGADIPIIGGMVAAWADTPSARYSPSRLFKLMRHFANANAEYFAADYESAEQALNEVPKDLNRYTAESVTAVKEAEKAIRSLDSNLSRAQQDTIDQAIAKLQETVNNLTLTPEAQKEEEAKREVEKLAKNKVISIDAGRKYFTLNQLKRIVDKASELGYSDVHLLLGNDGLRFLLDDMTITANGKTYASDDVKKAIIEGTKAYYDDPNGTALTQAEVTELIEYAKSKDIGLIPAINSPGHMDAMLVAMEKLGIKNPQAHFDKVSKTTMDLKNEEAMNFVKALIGKYMDFFAGKTKIFNFGTDEYANDATSAQGWYYLKWYQLYGKFAEYANTLAAMAKERGLQPMAFNDGFYYEDKDDVQFDKDVLISYWSKGWWGYNLASPQYLASKGYKFLNTNGDWYYILGQKPEDGGGFLKKAIENTGKTPFNQLASTKYPEVDLPTVGSMLSIWADRPSAEYKEEEIFELMTAFADHNKDYFRANYNALREELAKIPTNLEGYSKESLEALDAAKTALNYNLNRNKQAELDTLVANLKAALQGLKPAVTHSGSLDENEVAANVETRPELITRTEEIPFEVIKKENPNLPAGQENIITAGVKGERTHYISVLTENGKTTETVLDSQVTKEVINQVVEVGAPVTHKGDESGLAPTTEVKPRLDIQEEEIPFTTVTCENPLLLKGKTQVITKGVNGHRSNFYSVSTSADGKEVKTLVNSVVAQEAVTQIVEVGTMVTHVGDENGQAAIAEEKPKLEIPSQPAPSTAPAEESKVLPQDPAPVVTEKKAAALEHHHHHH

SEQ ID NO: 218 - protein, 2332 aa, Artificial Sequence
  Hybrid polypeptide
MASDETLITHTAEKPKEEKMIVEEKADKALETKNIVERTEQSEPSSTEAIASEKKEDEAVTPKEEKVSAKPEEKAPRIESQASNQEKPLKEDAKAVTNEEVNQMIEDRKVDFNQNWYFKLNANSKEAIKPDADVSTWKKLDLPYDWSIFNDFDHESPAQNEGGQLNGGEAWYRKTFKLDEKDLKKNVRLTFDGVYMDSQVYVNGQLVGHYPNGYNQFSYDITKYLQKDGRENVIAVHAVNKQPSSRWYSGSGIYRDVTLQVTDKVHVEKNGTTILTPKLEEQQHGKVETHVTSKIVNTDDKDHELVAEYQIVERGGHAVTGLVRTASRTLKAHESTSLDAILEVERPKLWTVLNDKPALYELITRVYRDGQLVDAKKDLFGYRYYHWTPNEGFSLNGERIKFHGVSLHHDHGALGAEENYKAEYRRLKQMKEMGVNSIRTTHNPASEQTLQIAAELGLLVQEEAFDTWYGGKKPYDYGRFFEKDATHPEARKGEKWSDFDLRTMVERGKNNPAIFMWSIGNEIGEANGDAHSLATVKRLVKVIKDVDKTRYVTMGADKFRFGNGSGGHEKIADELDAVGFNYSEDNYKALRAKHPKWLIYGSETSSATRTRGSYYRPERELKHSNGPERNYEQSDYGNDRVGWGKTATASWTFDRDNAGYAGQFIWTGTDYIGEPTPWHNQNQTPVKSSYFGIVDTAGIPKHDFYLYQSQWVSVKKKPMVHLLPHWNWENKELASKVADSEGKIPVRAYSNASSVELFLNGKSLGLKTFNKKQTSDGRTYQEGANANELYLEWKVAYQPGTLEAIARDESGKEIARDKITTAGKPAAVRLIKEDHAIAADGKDLTYIYYEIVDSQGNVVPTANNLVRFQLHGQGQLVGVDNGEQASRERYKAQADGSWIRKAFNGKGVAIVKSTEQAGKFTLTAHSDLLKSNQVTVFTGKKEGQEKTVLGTEVPKVQTIIGEAPEMPTTVPFVYSDGSRAERPVTWSSVDVSKPGIVTVKGMADGREVEARVEVIALKSELPVVKRIAPNTDLNSVDKSVSYVLIDGSVEEYEVDKWEIAEEDKAKGSGSGGGGADGVTPTTTENQPTIHTVSDSPQSSENRTEETPKAVLQPEAPKTVETETPATDKVASLPKTEEKPQEEVSSTPSDKAEVVTPTSAEKETANKKAEEASPKKEEAKEVDSKESNTDKTDKDKPAKKDEAKAEADKPATEAGKERAATVNEKLAKKKIVSIDAGRKYFSPEQLKEIIDKAKHYGYTDLHLLVGNDGLRFMLDDMSITANGKTYASDDVKRAIEKGTNDYYNDPNGNHLTESQMTDLINYAKDKGIGLIPTVNSPGHMDAILNAMKELGIQNPNFSYFGKKSARTVDLDNEQAVAFTKALIDKYAAYFAKKTEIFNIGLDEYANDATDAKGWSVLQADKYYPNEGYPVKGYEKFIAYANDLARIVKSHGLKPMAFNDGIYYNSDTSFGSFDKDIIVSMWTGGWGGYDVASSKLLAEKGHQILNTNDAWYYVLGRNADGQGWYNLDQGLNGIKNTPITSVPKTEGADIPIIGGMVAAWADTPSARYSPSRLFKLMRHFANANAEYFAADYESAEQALNEVPKDLNRYTAESVTAVKEAEKAIRSLDSNLSRAQQDTIDQAIAKLQETVNNLTLTPEAQKEEEAKREVEKLAKNKVISIDAGRKYFTLNQLKRIVDKASELGYSDVHLLLGNDGLRFLLDDMTITANGKTYASDDVKKAIIEGTKAYYDDPNGTALTQAEVTELIEYAKSKDIGLIPAINSPGHMDAMLVAMEKLGIKNPQAHFDKVSKTTMDLKNEEAMNFVKALIGKYMDFFAGKTKIFNFGTDEYANDATSAQGWYYLKWYQLYGKFAEYANTLAAMAKERGLQPMAFNDGFYYEDKDDVQFDKDVLISYWSKGWWGYNLASPQYLASKGYKFLNTNGDWYYILGQKPEDGGGFLKKAIENTGKTPFNQLASTKYPEVDLPTVGSMLSIWADRPSAEYKEEEIFELMTAFADHNKDYFRANYNALREELAKIPTNLEGYSKESLEALDAAKTALNYNLNRNKQAELDTLVANLKAALQGLKPAVTHSGSLDENEVAANVETRPELITRTEEIPFEVIKKENPNLPAGQENIITAGVKGERTHYISVLTENGKTTETVLDSQVTKEVINQVVEVGAPVTHKGDESGLAPTTEVKPRLDIQEEEIPFTTVTCENPLLLKGKTQVITKGVNGHRSNFYSVSTSADGKEVKTLVNSVVAQEAVTQIVEVGTMVTHVGDENGQAAIAEEKPKLEIPSQPAPSTAPAEESKVLPQDPAPVVTEKKAAALEHHHHHH

SEQ ID NO: 219 - protein, 2364 aa, Artificial Sequence
  Hybrid polypeptide
MASIAEEDKAKLAIPGSRIQATGYLEGQPIHATLVVEEGNPAAPAVPTVTVGGEAVTGLTSQKPMQYRTLAYGAKLPEVTASAKNAAVTVLQASAANGMRASIFIQPKDGGPLQTYAIQFLEEAPKIAHLSLQVEKADSLKEDQTVKLSVRAHYQDGTQAVLPADKVTFSTSGEGEVAIRKGMLELHKPGAVTLNAEYEGAKDQVELTIQANTEKKIAQSIRPVNVVTDLHQEPSLPATVTVEYDKGFPKTHKVTWQAIPKEKLDSYQTFEVLGKVEGIDLEARAKVSVEGIVSVEEVSVTTPIAEAPQLPESVRTYDSNGHVSSAKVAWDAIRPEQYAKEGVFTVNGRLEGTQLTTKLHVRVSAQTEQGANISDQWTGSELPLAFASDSNPSDPVSNVNDKLISYNNQPANRWTNWNRTNPEASVGVLFGDSGILSKRSVDNLSVGFHEDHGVGVPKSYVIEYYVGKTVPTAPKNPSFVGNEDHVFNDSANWKPVTNLKAPAQLKAGEMNHFSFDKVETYAVRIRMVKADNKRGTSITEVQIFAKQVAAAKQGQTRIQVDGKDLANFNPDLTDYYLESVDGKVPAVTASVSNNGLATVVPSVREGEPVRVIAKAENGDILGEYRLHFTKDKSLLSHKPVAAVKQARLLQVGQALELPTKVPVYFTGKDGYETKDLTVEWEEVPAENLTKAGQFTVRGRVLGSNLVAEITVRVTDKLGETLSDNPNYDENSNQAFASATNDIDKNSHDRVDYLNDGDHSENRRWTNWSPTPSSNPEVSAGVIFRENGKIVERTVTQGKVQFFADSGTDAPSKLVLERYVGPEFEVPTYYSNYQAYDADHPFNNPENWEAVPYRADKDIAAGDEINVTFKAIKAKAMRWRMERKADKSGVAMIEMTFLAPSELPQESTQSKILVDGKELADFAENRQDYQITYKGQRPKVSVEENNQVASTVVDSGEDSFPVLVRLVSESGKQVKEYRIHLTKEKPVSEKTVAAVQEDLPKIEFVEKDLAYKTVEKKDSTLYLGETRVEQEGKVGKERIFTAINPDGSKEEKLREVVEVPTDRIVLVGTKPVAQEAKKPQVSEKADTKPIDSSEASQTNKAQGSGSGGGGADGVTPTTTENQPTIHTVSDSPQSSENRTEETPKAVLQPEAPKTVETETPATDKVASLPKTEEKPQEEVSSTPSDKAEVVTPTSAEKETANKKAEEASPKKEEAKEVDSKESNTDKTDKDKPAKKDEAKAEADKPATEAGKERAATVNEKLAKKKIVSIDAGRKYFSPEQLKEIIDKAKHYGYTDLHLLVGNDGLRFMLDDMSITANGKTYASDDVKRAIEKGTNDYYNDPNGNHLTESQMTDLINYAKDKGIGLIPTVNSPGHMDAILNAMKELGIQNPNFSYFGKKSARTVDLDNEQAVAFTKALIDKYAAYFAKKTEIFNIGLDEYANDATDAKGWSVLQADKYYPNEGYPVKGYEKFIAYANDLARIVKSHGLKPMAFNDGIYYNSDTSFGSFDKDIIVSMWTGGWGGYDVASSKLLAEKGHQILNTNDAWYYVLGRNADGQGWYNLDQGLNGIKNTPITSVPKTEGADIPIIGGMVAAWADTPSARYSPSRLFKLMRHFANANAEYFAADYESAEQALNEVPKDLNRYTAESVTAVKEAEKAIRSLDSNLSRAQQDTIDQAIAKLQETVNNLTLTPEAQKEEEAKREVEKLAKNKVISIDAGRKYFTLNQLKRIVDKASELGYSDVHLLLGNDGLRFLLDDMTITANGKTYASDDVKKAIIEGTKAYYDDPNGTALTQAEVTELIEYAKSKDIGLIPAINSPGHMDAMLVAMEKLGIKNPQAHFDKVSKTTMDLKNEEAMNFVKALIGKYMDFFAGKTKIFNFGTDEYANDATSAQGWYYLKWYQLYGKFAEYANTLAAMAKERGLQPMAFNDGFYYEDKDDVQFDKDVLISYWSKGWWGYNLASPQYLASKGYKFLNTNGDWYYILGQKPEDGGGFLKKAIENTGKTPFNQLASTKYPEVDLPTVGSMLSIWADRPSAEYKEEEIFELMTAFADHNKDYFRANYNALREELAKIPTNLEGYSKESLEALDAAKTALNYNLNRNKQAELDTLVANLKAALQGLKPAVTHSGSLDENEVAANVETRPELITRTEEIPFEVIKKENPNLPAGQENIITAGVKGERTHYISVLTENGKTTETVLDSQVTKEVINQVVEVGAPVTHKGDESGLAPTTEVKPRLDIQEEEIPFTTVTCENPLLLKGKTQVITKGVNGHRSNFYSVSTSADGKEVKTLVNSVVAQEAVTQIVEVGTMVTHVGDENGQAAIAEEKPKLEIPSQPAPSTAPAEESKVLPQDPAPVVTEKKLEHHHHHH

SEQ ID NO: 220 - protein, 2341 aa, Artificial Sequence
  Hybrid polypeptide
MASDETLITHTAEKPKEEKMIVEEKADKALETKNIVERTEQSEPSSTEAIASEKKEDEAVTPKEEKVSAKPEEKAPRIESQASNQEKPLKEDAKAVTNEEVNQMIEDRKVDFNQNWYFKLNANSKEAIKPDADVSTWKKLDLPYDWSIFNDFDHESPAQNEGGQLNGGEAWYRKTFKLDEKDLKKNVRLTFDGVYMDSQVYVNGQLVGHYPNGYNQFSYDITKYLQKDGRENVIAVHAVNKQPSSRWYSGSGIYRDVTLQVTDKVHVEKNGTTILTPKLEEQQHGKVETHVTSKIVNTDDKDHELVAEYQIVERGGHAVTGLVRTASRTLKAHESTSLDAILEVERPKLWTVLNDKPALYELITRVYRDGQLVDAKKDLFGYRYYHWTPNEGFSLNGERIKFHGVSLHHDHGALGAEENYKAEYRRLKQMKEMGVNSIRTTHNPASEQTLQIAAELGLLVQEEAFDTWYGGKKPYDYGRFFEKDATHPEARKGEKWSDFDLRTMVERGKNNPAIFMWSIGNEIGEANGDAHSLATVKRLVKVIKDVDKTRYVTMGADKFRFGNGSGGHEKIADELDAVGFNYSEDNYKALRAKHPKWLIYGSETSSATRTRGSYYRPERELKHSNGPERNYEQSDYGNDRVGWGKTATASWTFDRDNAGYAGQFIWTGTDYIGEPTPWHNQNQTPVKSSYFGIVDTAGIPKHDFYLYQSQWVSVKKKPMVHLLPHWNWENKELASKVADSEGKIPVRAYSNASSVELFLNGKSLGLKTFNKKQTSDGRTYQEGANANELYLEWKVAYQPGTLEAIARDESGKEIARDKITTAGKPAAVRLIKEDHAIAADGKDLTYIYYEIVDSQGNVVPTANNLVRFQLHGQGQLVGVDNGEQASRERYKAQADGSWIRKAFNGKGVAIVKSTEQAGKFTLTAHSDLLKSNQVTVFTGKKEGQEKTVLGTEVPKVQTIIGEAPEMPTTVPFVYSDGSRAERPVTWSSVDVSKPGIVTVKGMADGREVEARVEVIALKSELPVVKRIAPNTDLNSVDKSVSYVLIDGSVEEYEVDKWEIAEEDKAKLAIPGSRIQATGYLEGQPIHATLVVEEGNPAAPAVPTVTVGGEAVTGLTSQKPMQYRTLAYGAKLPEVTASAKNAAVTVLQASAANGMRASIFIQPKDGGPLQTYAIQFLEEAPKIAHLSLQVEKADSLKEDQTVKLSVRAHYQDGTQAVLPADKVTFSTSGEGEVAIRKGMLELHKPGAVTLNAEYEGAKDQVELTIQANTEKKIAQSIRPVNVVTDLHQEPSLPATVTVEYDKGFPKTHKVTWQAIPKEKLDSYQTFEVLGKVEGIDLEARAKVSVEGIVSVEEVSVTTPIAEAPQLPESVRTYDSNGHVSSAKVAWDAIRPEQYAKEGVFTVNGRLEGTQLTTKLHVRVSAQTEQGANISDQWTGSELPLAFASDSNPSDPVSNVNDKLISYNNQPANRWTNWNRTNPEASVGVLFGDSGILSKRSVDNLSVGFHEDHGVGVPKSYVIEYYVGKTVPTAPKNPSFVGNEDHVFNDSANWKPVTNLKAPAQLKAGEMNHFSFDKVETYAVRIRMVKADNKRGTSITEVQIFAKQVAAAKQGQTRIQVDGKDLANFNPDLTDYYLESVDGKVPAVTASVSNNGLATVVPSVREGEPVRVIAKAENGDILGEYRLHFTKDKSLLSHKPVAAVKQARLLQVGQALELPTKVPVYFTGKDGYETKDLTVEWEEVPAENLTKAGQFTVRGRVLGSNLVAEITVRVTDKLGETLSDNPNYDENSNQAFASATNDIDKNSHDRVDYLNDGDHSENRRWTNWSPTPSSNPEVSAGVIFRENGKIVERTVTQGKVQFFADSGTDAPSKLVLERYVGPEFEVPTYYSNYQAYDADHPFNNPENWEAVPYRADKDIAAGDEINVTFKAIKAKAMRWRMERKADKSGVAMIEMTFLAPSELPQESTQSKILVDGKELADFAENRQDYQITYKGQRPKVSVEENNQVASTVVDSGEDSFPVLVRLVSESGKQVKEYRIHLTKEKPVSEKTVAAVQEDLPKIEFVEKDLAYKTVEKKDSTLYLGETRVEQEGKVGKERIFTAINPDGSKEEKLREVVEVPTDRIVLVGTKPVAQEAKKPQVSEKADTKPIDSSEASQTNKAQGSGSGGGGVSAQESSTYTVKEGDTLSEIAETHNTTVEKLAENNHIDNIHLIYVDQELVIDGPVAPVATPAPATYAAPAAQDETVSAPVAETPVVSETVVSTVSGSEAEAKEWIAQKESGGSYTATNGRYIGRYQLTDSYLNGDYSAENQERVADAYVAGRYGSWTAAKNFWLNNGWYLEHHHHHH

SEQ ID NO: 221 - protein, 1251 aa, Artificial Sequence
  Hybrid polypeptide
MASDETLITHTAEKPKEEKMIVEEKADKALETKNIVERTEQSEPSSTEAIASEKKEDEAVTPKEEKVSAKPEEKAPRIESQASNQEKPLKEDAKAVTNEEVNQMIEDRKVDFNQNWYFKLNANSKEAIKPDADVSTWKKLDLPYDWSIFNDFDHESPAQNEGGQLNGGEAWYRKTFKLDEKDLKKNVRLTFDGVYMDSQVYVNGQLVGHYPNGYNQFSYDITKYLQKDGRENVIAVHAVNKQPSSRWYSGSGIYRDVTLQVTDKVHVEKNGTTILTPKLEEQQHGKVETHVTSKIVNTDDKDHELVAEYQIVERGGHAVTGLVRTASRTLKAHESTSLDAILEVERPKLWTVLNDKPALYELITRVYRDGQLVDAKKDLFGYRYYHWTPNEGFSLNGERIKFHGVSLHHDHGALGAEENYKAEYRRLKQMKEMGVNSIRTTHNPASEQTLQIAAELGLLVQEEAFDTWYGGKKPYDYGRFFEKDATHPEARKGEKWSDFDLRTMVERGKNNPAIFMWSIGNEIGEANGDAHSLATVKRLVKVIKDVDKTRYVTMGADKFRFGNGSGGHEKIADELDAVGFNYSEDNYKALRAKHPKWLIYGSETSSATRTRGSYYRPERELKHSNGPERNYEQSDYGNDRVGWGKTATASWTFDRDNAGYAGQFIWTGTDYIGEPTPWHNQNQTPVKSSYFGIVDTAGIPKHDFYLYQSQWVSVKKKPMVHLLPHWNWENKELASKVADSEGKIPVRAYSNASSVELFLNGKSLGLKTFNKKQTSDGRTYQEGANANELYLEWKVAYQPGTLEAIARDESGKEIARDKITTAGKPAAVRLIKEDHAIAADGKDLTYIYYEIVDSQGNVVPTANNLVRFQLHGQGQLVGVDNGEQASRERYKAQADGSWIRKAFNGKGVAIVKSTEQAGKFTLTAHSDLLKSNQVTVFTGKKEGQEKTVLGTEVPKVQTIIGEAPEMPTTVPFVYSDGSRAERPVTWSSVDVSKPGIVTVKGMADGREVEARVEVIALKSELPVVKRIAPNTDLNSVDKSVSYVLIDGSVEEYEVDKWEIAEEDKAKGSGSGGGGVSAQESSTYTVKEGDTLSEIAETHNTTVEKLAENNHIDNIHLIYVDQELVIDGPVAPVATPAPATYAAPAAQDETVSAPVAETPVVSETVVSTVSGSEAEAKEWIAQKESGGSYTATNGRYIGRYQLTDSYLNGDYSAENQERVADAYVAGRYGSWTAAKNFWLNNGWYLEHHHHHH

SEQ ID NO: 222 - protein, 1286 aa, Artificial Sequence
  Hybrid polypeptide
MASIAEEDKAKLAIPGSRIQATGYLEGQPIHATLVVEEGNPAAPAVPTVTVGGEAVTGLTSQKPMQYRTLAYGAKLPEVTASAKNAAVTVLQASAANGMRASIFIQPKDGGPLQTYAIQFLEEAPKIAHLSLQVEKADSLKEDQTVKLSVRAHYQDGTQAVLPADKVTFSTSGEGEVAIRKGMLELHKPGAVTLNAEYEGAKDQVELTIQANTEKKIAQSIRPVNVVTDLHQEPSLPATVTVEYDKGFPKTHKVTWQAIPKEKLDSYQTFEVLGKVEGIDLEARAKVSVEGIVSVEEVSVTTPIAEAPQLPESVRTYDSNGHVSSAKVAWDAIRPEQYAKEGVFTVNGRLEGTQLTTKLHVRVSAQTEQGANISDQWTGSELPLAFASDSNPSDPVSNVNDKLISYNNQPANRWTNWNRTNPEASVGVLFGDSGILSKRSVDNLSVGFHEDHGVGVPKSYVIEYYVGKTVPTAPKNPSFVGNEDHVFNDSANWKPVTNLKAPAQLKAGEMNHFSFDKVETYAVRIRMVKADNKRGTSITEVQIFAKQVAAAKQGQTRIQVDGKDLANFNPDLTDYYLESVDGKVPAVTASVSNNGLATVVPSVREGEPVRVIAKAENGDILGEYRLHFTKDKSLLSHKPVAAVKQARLLQVGQALELPTKVPVYFTGKDGYETKDLTVEWEEVPAENLTKAGQFTVRGRVLGSNLVAEITVRVTDKLGETLSDNPNYDENSNQAFASATNDIDKNSHDRVDYLNDGDHSENRRWTNWSPTPSSNPEVSAGVIFRENGKIVERTVTQGKVQFFADSGTDAPSKLVLERYVGPEFEVPTYYSNYQAYDADHPFNNPENWEAVPYRADKDIAAGDEINVTFKAIKAKAMRWRMERKADKSGVAMIEMTFLAPSELPQESTQSKILVDGKELADFAENRQDYQITYKGQRPKVSVEENNQVASTVVDSGEDSFPVLVRLVSESGKQVKEYRIHLTKEKPVSEKTVAAVQEDLPKIEFVEKDLAYKTVEKKDSTLYLGETRVEQEGKVGKERIFTAINPDGSKEEKLREVVEVPTDRIVLVGTKPVAQEAKKPQVSEKADTKPIDSSEASQTNKAQGSGSGGGGVSAQESSTYTVKEGDTLSEIAETHNTTVEKLAENNHIDNIHLIYVDQELVIDGPVAPVATPAPATYAAPAAQDETVSAPVAETPVVSETVVSTVSGSEAEAKEWIAQKESGGSYTATNGRYIGRYQLTDSYLNGDYSAENQERVADAYVAGRYGSWTAAKNFWLNNGWYLEHHHHHH

SEQ ID NO: 223 - protein, 2541 aa, Artificial Sequence
  Hybrid polypeptide
MASDETLITHTAEKPKEEKMIVEEKADKALETKNIVERTEQSEPSSTEAIASEKKEDEAVTPKEEKVSAKPEEKAPRIESQASNQEKPLKEDAKAVTNEEVNQMIEDRKVDFNQNWYFKLNANSKEAIKPDADVSTWKKLDLPYDWSIFNDFDHESPAQNEGGQLNGGEAWYRKTFKLDEKDLKKNVRLTFDGVYMDSQVYVNGQLVGHYPNGYNQFSYDITKYLQKDGRENVIAVHAVNKQPSSRWYSGSGIYRDVTLQVTDKVHVEKNGTTILTPKLEEQQHGKVETHVTSKIVNTDDKDHELVAEYQIVERGGHAVTGLVRTASRTLKAHESTSLDAILEVERPKLWTVLNDKPALYELITRVYRDGQLVDAKKDLFGYRYYHWTPNEGFSLNGERIKFHGVSLHHDHGALGAEENYKAEYRRLKQMKEMGVNSIRTTHNPASEQTLQIAAELGLLVQEEAFDTWYGGKKPYDYGRFFEKDATHPEARKGEKWSDFDLRTMVERGKNNPAIFMWSIGNEIGEANGDAHSLATVKRLVKVIKDVDKTRYVTMGADKFRFGNGSGGHEKIADELDAVGFNYSEDNYKALRAKHPKWLIYGSETSSATRTRGSYYRPERELKHSNGPERNYEQSDYGNDRVGWGKTATASWTFDRDNAGYAGQFIWTGTDYIGEPTPWHNQNQTPVKSSYFGIVDTAGIPKHDFYLYQSQWVSVKKKPMVHLLPHWNWENKELASKVADSEGKIPVRAYSNASSVELFLNGKSLGLKTFNKKQTSDGRTYQEGANANELYLEWKVAYQPGTLEAIARDESGKEIARDKITTAGKPAAVRLIKEDHAIAADGKDLTYIYYEIVDSQGNVVPTANNLVRFQLHGQGQLVGVDNGEQASRERYKAQADGSWIRKAFNGKGVAIVKSTEQAGKFTLTAHSDLLKSNQVTVFTGKKEGQEKTVLGTEVPKVQTIIGEAPEMPTTVPFVYSDGSRAERPVTWSSVDVSKPGIVTVKGMADGREVEARVEVIALKSELPVVKRIAPNTDLNSVDKSVSYVLIDGSVEEYEVDKWEIAEEDKAKLAIPGSRIQATGYLEGQPIHATLVVEEGNPAAPAVPTVTVGGEAVTGLTSQKPMQYRTLAYGAKLPEVTASAKNAAVTVLQASAANGMRASIFIQPKDGGPLQTYAIQFLEEAPKIAHLSLQVEKADSLKEDQTVKLSVRAHYQDGTQAVLPADKVTFSTSGEGEVAIRKGMLELHKPGAVTLNAEYEGAKDQVELTIQANTEKKIAQSIRPVNVVTDLHQEPSLPATVTVEYDKGFPKTHKVTWQAIPKEKLDSYQTFEVLGKVEGIDLEARAKVSVEGIVSVEEVSVTTPIAEAPQLPESVRTYDSNGHVSSAKVAWDAIRPEQYAKEGVFTVNGRLEGTQLTTKLHVRVSAQTEQGANISDQWTGSELPLAFASDSNPSDPVSNVNDKLISYNNQPANRWTNWNRTNPEASVGVLFGDSGILSKRSVDNLSVGFHEDHGVGVPKSYVIEYYVGKTVPTAPKNPSFVGNEDHVFNDSANWKPVTNLKAPAQLKAGEMNHFSFDKVETYAVRIRMVKADNKRGTSITEVQIFAKQVAAAKQGQTRIQVDGKDLANFNPDLTDYYLESVDGKVPAVTASVSNNGLATVVPSVREGEPVRVIAKAENGDILGEYRLHFTKDKSLLSHKPVAAVKQARLLQVGQALELPTKVPVYFTGKDGYETKDLTVEWEEVPAENLTKAGQFTVRGRVLGSNLVAEITVRVTDKLGETLSDNPNYDENSNQAFASATNDIDKNSHDRVDYLNDGDHSENRRWTNWSPTPSSNPEVSAGVIFRENGKIVERTVTQGKVQFFADSGTDAPSKLVLERYVGPEFEVPTYYSNYQAYDADHPFNNPENWEAVPYRADKDIAAGDEINVTFKAIKAKAMRWRMERKADKSGVAMIEMTFLAPSELPQESTQSKILVDGKELADFAENRQDYQITYKGQRPKVSVEENNQVASTVVDSGEDSFPVLVRLVSESGKQVKEYRIHLTKEKPVSEKTVAAVQEDLPKIEFVEKDLAYKTVEKKDSTLYLGETRVEQEGKVGKERIFTAINPDGSKEEKLREVVEVPTDRIVLVGTKPVAQEAKKPQVSEKADTKPIDSSEASQTNKAQGSGSGGGGAETTDDKIAAQDNKISNLTAQQQEAQKQVDQIQEQVSAIQAEQSNLQAENDRLQAESKKLEGEITELSKNIVSRNQSLEKQARSAQTNGAVTSYINTIVNSKSITEAISRVAAMSEIVSANNKMLEQQKADKKAISEKQVANNDAINTVIANQQKLADDAQALTTKQAELKAAELSLAAEKATAEGEKASLLEQKAAAEAEARAAAVAEAAYKEKRASQQQSVLASANTNLTAQVQAVSESAAAPVRAKVRPTYSTNASSYPIGECTWGVKTLAPWAGDYWGNGAQWATSAAAAGFRTGSTPQVGAIACWNDGGYGHVAVVTAVESTTRIQVSESNYAGNRTIGNHRGWFNPTTTSEGFVTYIYADAAALEHHHHHH

SEQ ID NO: 224 - protein, 1451 aa, Artificial Sequence
  Hybrid polypeptide
MASDETLITHTAEKPKEEKMIVEEKADKALETKNIVERTEQSEPSSTEAIASEKKEDEAVTPKEEKVSAKPEEKAPRIESQASNQEKPLKEDAKAVTNEEVNQMIEDRKVDFNQNWYFKLNANSKEAIKPDADVSTWKKLDLPYDWSIFNDFDHESPAQNEGGQLNGGEAWYRKTFKLDEKDLKKNVRLTFDGVYMDSQVYVNGQLVGHYPNGYNQFSYDITKYLQKDGRENVIAVHAVNKQPSSRWYSGSGIYRDVTLQVTDKVHVEKNGTTILTPKLEEQQHGKVETHVTSKIVNTDDKDHELVAEYQIVERGGHAVTGLVRTASRTLKAHESTSLDAILEVERPKLWTVLNDKPALYELITRVYRDGQLVDAKKDLFGYRYYHWTPNEGFSLNGERIKFHGVSLHHDHGALGAEENYKAEYRRLKQMKEMGVNSIRTTHNPASEQTLQIAAELGLLVQEEAFDTWYGGKKPYDYGRFFEKDATHPEARKGEKWSDFDLRTMVERGKNNPAIFMWSIGNEIGEANGDAHSLATVKRLVKVIKDVDKTRYVTMGADKFRFGNGSGGHEKIADELDAVGFNYSEDNYKALRAKHPKWLIYGSETSSATRTRGSYYRPERELKHSNGPERNYEQSDYGNDRVGWGKTATASWTFDRDNAGYAGQFIWTGTDYIGEPTPWHNQNQTPVKSSYFGIVDTAGIPKHDFYLYQSQWVSVKKKPMVHLLPHWNWENKELASKVADSEGKIPVRAYSNASSVELFLNGKSLGLKTFNKKQTSDGRTYQEGANANELYLEWKVAYQPGTLEAIARDESGKEIARDKITTAGKPAAVRLIKEDHAIAADGKDLTYIYYEIVDSQGNVVPTANNLVRFQLHGQGQLVGVDNGEQASRERYKAQADGSWIRKAFNGKGVAIVKSTEQAGKFTLTAHSDLLKSNQVTVFTGKKEGQEKTVLGTEVPKVQTIIGEAPEMPTTVPFVYSDGSRAERPVTWSSVDVSKPGIVTVKGMADGREVEARVEVIALKSELPVVKRIAPNTDLNSVDKSVSYVLIDGSVEEYEVDKWEIAEEDKAKGSGSGGGGAETTDDKIAAQDNKISNLTAQQQEAQKQVDQIQEQVSAIQAEQSNLQAENDRLQAESKKLEGEITELSKNIVSRNQSLEKQARSAQTNGAVTSYINTIVNSKSITEAISRVAAMSEIVSANNKMLEQQKADKKAISEKQVANNDAINTVIANQQKLADDAQALTTKQAELKAAELSLAAEKATAEGEKASLLEQKAAAEAEARAAAVAEAAYKEKRASQQQSVLASANTNLTAQVQAVSESAAAPVRAKVRPTYSTNASSYPIGECTWGVKTLAPWAGDYWGNGAQWATSAAAAGFRTGSTPQVGAIACWNDGGYGHVAVVTAVESTTRIQVSESNYAGNRTIGNHRGWFNPTTTSEGFVTYIYADAAALEHHHHHH

SEQ ID NO: 225 - protein, 1486 aa, Artificial Sequence
  Hybrid polypeptide
MASIAEEDKAKLAIPGSRIQATGYLEGQPIHATLVVEEGNPAAPAVPTVTVGGEAVTGLTSQKPMQYRTLAYGAKLPEVTASAKNAAVTVLQASAANGMRASIFIQPKDGGPLQTYAIQFLEEAPKIAHLSLQVEKADSLKEDQTVKLSVRAHYQDGTQAVLPADKVTFSTSGEGEVAIRKGMLELHKPGAVTLNAEYEGAKDQVELTIQANTEKKIAQSIRPVNVVTDLHQEPSLPATVTVEYDKGFPKTHKVTWQAIPKEKLDSYQTFEVLGKVEGIDLEARAKVSVEGIVSVEEVSVTTPIAEAPQLPESVRTYDSNGHVSSAKVAWDAIRPEQYAKEGVFTVNGRLEGTQLTTKLHVRVSAQTEQGANISDQWTGSELPLAFASDSNPSDPVSNVNDKLISYNNQPANRWTNWNRTNPEASVGVLFGDSGILSKRSVDNLSVGFHEDHGVGVPKSYVIEYYVGKTVPTAPKNPSFVGNEDHVFNDSANWKPVTNLKAPAQLKAGEMNHFSFDKVETYAVRIRMVKADNKRGTSITEVQIFAKQVAAAKQGQTRIQVDGKDLANFNPDLTDYYLESVDGKVPAVTASVSNNGLATVVPSVREGEPVRVIAKAENGDILGEYRLHFTKDKSLLSHKPVAAVKQARLLQVGQALELPTKVPVYFTGKDGYETKDLTVEWEEVPAENLTKAGQFTVRGRVLGSNLVAEITVRVTDKLGETLSDNPNYDENSNQAFASATNDIDKNSHDRVDYLNDGDHSENRRWTNWSPTPSSNPEVSAGVIFRENGKIVERTVTQGKVQFFADSGTDAPSKLVLERYVGPEFEVPTYYSNYQAYDADHPFNNPENWEAVPYRADKDIAAGDEINVTFKAIKAKAMRWRMERKADKSGVAMIEMTFLAPSELPQESTQSKILVDGKELADFAENRQDYQITYKGQRPKVSVEENNQVASTVVDSGEDSFPVLVRLVSESGKQVKEYRIHLTKEKPVSEKTVAAVQEDLPKIEFVEKDLAYKTVEKKDSTLYLGETRVEQEGKVGKERIFTAINPDGSKEEKLREVVEVPTDRIVLVGTKPVAQEAKKPQVSEKADTKPIDSSEASQTNKAQGSGSGGGGAETTDDKIAAQDNKISNLTAQQQEAQKQVDQIQEQVSAIQAEQSNLQAENDRLQAESKKLEGEITELSKNIVSRNQSLEKQARSAQTNGAVTSYINTIVNSKSITEAISRVAAMSEIVSANNKMLEQQKADKKAISEKQVANNDAINTVIANQQKLADDAQALTTKQAELKAAELSLAAEKATAEGEKASLLEQKAAAEAEARAAAVAEAAYKEKRASQQQSVLASANTNLTAQVQAVSESAAAPVRAKVRPTYSTNASSYPIGECTWGVKTLAPWAGDYWGNGAQWATSAAAAGFRTGSTPQVGAIACWNDGGYGHVAVVTAVESTTRIQVSESNYAGNRTIGNHRGWFNPTTTSEGFVTYIYADAAALEHHHHHH

SEQ ID NO: 226 - protein, 2996 aa, Artificial Sequence
  Hybrid polypeptide
MASDETLITHTAEKPKEEKMIVEEKADKALETKNIVERTEQSEPSSTEAIASEKKEDEAVTPKEEKVSAKPEEKAPRIESQASNQEKPLKEDAKAVTNEEVNQMIEDRKVDFNQNWYFKLNANSKEAIKPDADVSTWKKLDLPYDWSIFNDFDHESPAQNEGGQLNGGEAWYRKTFKLDEKDLKKNVRLTFDGVYMDSQVYVNGQLVGHYPNGYNQFSYDITKYLQKDGRENVIAVHAVNKQPSSRWYSGSGIYRDVTLQVTDKVHVEKNGTTILTPKLEEQQHGKVETHVTSKIVNTDDKDHELVAEYQIVERGGHAVTGLVRTASRTLKAHESTSLDAILEVERPKLWTVLNDKPALYELITRVYRDGQLVDAKKDLFGYRYYHWTPNEGFSLNGERIKFHGVSLHHDHGALGAEENYKAEYRRLKQMKEMGVNSIRTTHNPASEQTLQIAAELGLLVQEEAFDTWYGGKKPYDYGRFFEKDATHPEARKGEKWSDFDLRTMVERGKNNPAIFMWSIGNEIGEANGDAHSLATVKRLVKVIKDVDKTRYVTMGADKFRFGNGSGGHEKIADELDAVGFNYSEDNYKALRAKHPKWLIYGSETSSATRTRGSYYRPERELKHSNGPERNYEQSDYGNDRVGWGKTATASWTFDRDNAGYAGQFIWTGTDYIGEPTPWHNQNQTPVKSSYFGIVDTAGIPKHDFYLYQSQWVSVKKKPMVHLLPHWNWENKELASKVADSEGKIPVRAYSNASSVELFLNGKSLGLKTFNKKQTSDGRTYQEGANANELYLEWKVAYQPGTLEAIARDESGKEIARDKITTAGKPAAVRLIKEDHAIAADGKDLTYIYYEIVDSQGNVVPTANNLVRFQLHGQGQLVGVDNGEQASRERYKAQADGSWIRKAFNGKGVAIVKSTEQAGKFTLTAHSDLLKSNQVTVFTGKKEGQEKTVLGTEVPKVQTIIGEAPEMPTTVPFVYSDGSRAERPVTWSSVDVSKPGIVTVKGMADGREVEARVEVIALKSELPVVKRIAPNTDLNSVDKSVSYVLIDGSVEEYEVDKWEIAEEDKAKLAIPGSRIQATGYLEGQPIHATLVVEEGNPAAPAVPTVTVGGEAVTGLTSQKPMQYRTLAYGAKLPEVTASAKNAAVTVLQASAANGMRASIFIQPKDGGPLQTYAIQFLEEAPKIAHLSLQVEKADSLKEDQTVKLSVRAHYQDGTQAVLPADKVTFSTSGEGEVAIRKGMLELHKPGAVTLNAEYEGAKDQVELTIQANTEKKIAQSIRPVNVVTDLHQEPSLPATVTVEYDKGFPKTHKVTWQAIPKEKLDSYQTFEVLGKVEGIDLEARAKVSVEGIVSVEEVSVTTPIAEAPQLPESVRTYDSNGHVSSAKVAWDAIRPEQYAKEGVFTVNGRLEGTQLTTKLHVRVSAQTEQGANISDQWTGSELPLAFASDSNPSDPVSNVNDKLISYNNQPANRWTNWNRTNPEASVGVLFGDSGILSKRSVDNLSVGFHEDHGVGVPKSYVIEYYVGKTVPTAPKNPSFVGNEDHVFNDSANWKPVTNLKAPAQLKAGEMNHFSFDKVETYAVRIRMVKADNKRGTSITEVQIFAKQVAAAKQGQTRIQVDGKDLANFNPDLTDYYLESVDGKVPAVTASVSNNGLATVVPSVREGEPVRVIAKAENGDILGEYRLHFTKDKSLLSHKPVAAVKQARLLQVGQALELPTKVPVYFTGKDGYETKDLTVEWEEVPAENLTKAGQFTVRGRVLGSNLVAEITVRVTDKLGETLSDNPNYDENSNQAFASATNDIDKNSHDRVDYLNDGDHSENRRWTNWSPTPSSNPEVSAGVIFRENGKIVERTVTQGKVQFFADSGTDAPSKLVLERYVGPEFEVPTYYSNYQAYDADHPFNNPENWEAVPYRADKDIAAGDEINVTFKAIKAKAMRWRMERKADKSGVAMIEMTFLAPSELPQESTQSKILVDGKELADFAENRQDYQITYKGQRPKVSVEENNQVASTVVDSGEDSFPVLVRLVSESGKQVKEYRIHLTKEKPVSEKTVAAVQEDLPKIEFVEKDLAYKTVEKKDSTLYLGETRVEQEGKVGKERIFTAINPDGSKEEKLREVVEVPTDRIVLVGTKPVAQEAKKPQVSEKADTKPIDSSEASQTNKAQGSGSGGGGETPETSPAIGKVVIKETGEGGALLGDAVFELKNNTDGTTVSQRTEAQTGEAIFSNIKPGTYTLTEAQPPVGYKPSTKQWTVEVEKNGRTTVQGEQVENREEALSDQYPQTGTYPDVQTPYQIIKVDGSEKNGQHKALNPNPYERVIPEGTLSKRIYQVNNLDDNQYGIELTVSGKTVYEQKDKSVPLDVVILLDNSNSMSNIRNKNARRAERAGEATRSLIDKITSDSENRVALVTYASTIFDGTEFTVEKGVADKNGKRLNDSLFWNYDQTSFTTNTKDYSYLKLTNDKNDIVELKNKVPTEAEDHDGNRLMYQFGATFTQKALMKADEILTQQARQNSQKVIFHITDGVPTMSYPINFNHATFAPSYQNQLNAFFSKSPNKDGILLSDFITQATSGEHTIVRGDGQSYQMFTDKTVYEKGAPAAFPVKPEKYSEMKAAGYAVIGDPINGGYIWLNWRESILAYPFNSNTAKITNHGDPTRWYYNGNIAPDGYDVFTVGIGINGDPGTDEATATSFMQSISSKPENYTNVTDTTKILEQLNRYFHTIVTEKKSIENGTITDPMGELIDLQLGTDGRFDPADYTLTANDGSRLENGQAVGGPQNDGGLLKNAKVLYDTTEKRIRVTGLYLGTDEKVTLTYNVRLNDEFVSNKFYDTNGRTTLHPKEVEQNTVRDFPIPKIRDVRKYPEITISKEKKLGDIEFIKVNKNDKKPLRGAVFSLQKQHPDYPDIYGAIDQNGTYQNVRTGEDGKLTFKNLSDGKYRLFENSEPAGYKPVQNKPIVAFQIVNGEVRDVTSIVPQDIPAGYEFTNDKHYITNEPIPPKRELEHHHHHH

SEQ ID NO: 227 - protein, 1906 aa, Artificial Sequence
  Hybrid polypeptide
MASDETLITHTAEKPKEEKMIVEEKADKALETKNIVERTEQSEPSSTEAIASEKKEDEAVTPKEEKVSAKPEEKAPRIESQASNQEKPLKEDAKAVTNEEVNQMIEDRKVDFNQNWYFKLNANSKEAIKPDADVSTWKKLDLPYDWSIFNDFDHESPAQNEGGQLNGGEAWYRKTFKLDEKDLKKNVRLTFDGVYMDSQVYVNGQLVGHYPNGYNQFSYDITKYLQKDGRENVIAVHAVNKQPSSRWYSGSGIYRDVTLQVTDKVHVEKNGTTILTPKLEEQQHGKVETHVTSKIVNTDDKDHELVAEYQIVERGGHAVTGLVRTASRTLKAHESTSLDAILEVERPKLWTVLNDKPALYELITRVYRDGQLVDAKKDLFGYRYYHWTPNEGFSLNGERIKFHGVSLHHDHGALGAEENYKAEYRRLKQMKEMGVNSIRTTHNPASEQTLQIAAELGLLVQEEAFDTWYGGKKPYDYGRFFEKDATHPEARKGEKWSDFDLRTMVERGKNNPAIFMWSIGNEIGEANGDAHSLATVKRLVKVIKDVDKTRYVTMGADKFRFGNGSGGHEKIADELDAVGFNYSEDNYKALRAKHPKWLIYGSETSSATRTRGSYYRPERELKHSNGPERNYEQSDYGNDRVGWGKTATASWTFDRDNAGYAGQFIWTGTDYIGEPTPWHNQNQTPVKSSYFGIVDTAGIPKHDFYLYQSQWVSVKKKPMVHLLPHWNWENKELASKVADSEGKIPVRAYSNASSVELFLNGKSLGLKTFNKKQTSDGRTYQEGANANELYLEWKVAYQPGTLEAIARDESGKEIARDKITTAGKPAAVRLIKEDHAIAADGKDLTYIYYEIVDSQGNVVPTANNLVRFQLHGQGQLVGVDNGEQASRERYKAQADGSWIRKAFNGKGVAIVKSTEQAGKFTLTAHSDLLKSNQVTVFTGKKEGQEKTVLGTEVPKVQTIIGEAPEMPTTVPFVYSDGSRAERPVTWSSVDVSKPGIVTVKGMADGREVEARVEVIALKSELPVVKRIAPNTDLNSVDKSVSYVLIDGSVEEYEVDKWEIAEEDKAKGSGSGGGGETPETSPAIGKVVIKETGEGGALLGDAVFELKNNTDGTTVSQRTEAQTGEAIFSNIKPGTYTLTEAQPPVGYKPSTKQWTVEVEKNGRTTVQGEQVENREEALSDQYPQTGTYPDVQTPYQIIKVDGSEKNGQHKALNPNPYERVIPEGTLSKRIYQVNNLDDNQYGIELTVSGKTVYEQKDKSVPLDVVILLDNSNSMSNIRNKNARRAERAGEATRSLIDKITSDSENRVALVTYASTIFDGTEFTVEKGVADKNGKRLNDSLFWNYDQTSFTTNTKDYSYLKLTNDKNDIVELKNKVPTEAEDHDGNRLMYQFGATFTQKALMKADEILTQQARQNSQKVIFHITDGVPTMSYPINFNHATFAPSYQNQLNAFFSKSPNKDGILLSDFITQATSGEHTIVRGDGQSYQMFTDKTVYEKGAPAAFPVKPEKYSEMKAAGYAVIGDPINGGYIWLNWRESILAYPFNSNTAKITNHGDPTRWYYNGNIAPDGYDVFTVGIGINGDPGTDEATATSFMQSISSKPENYTNVTDTTKILEQLNRYFHTIVTEKKSIENGTITDPMGELIDLQLGTDGRFDPADYTLTANDGSRLENGQAVGGPQNDGGLLKNAKVLYDTTEKRIRVTGLYLGTDEKVTLTYNVRLNDEFVSNKFYDTNGRTTLHPKEVEQNTVRDFPIPKIRDVRKYPEITISKEKKLGDIEFIKVNKNDKKPLRGAVFSLQKQHPDYPDIYGAIDQNGTYQNVRTGEDGKLTFKNLSDGKYRLFENSEPAGYKPVQNKPIVAFQIVNGEVRDVTSIVPQDIPAGYEFTNDKHYITNEPIPPKRELEHHHHHH

SEQ ID NO: 228 - protein, 1941 aa, Artificial Sequence
  Hybrid polypeptide
MASIAEEDKAKLAIPGSRIQATGYLEGQPIHATLVVEEGNPAAPAVPTVTVGGEAVTGLTSQKPMQYRTLAYGAKLPEVTASAKNAAVTVLQASAANGMRASIFIQPKDGGPLQTYAIQFLEEAPKIAHLSLQVEKADSLKEDQTVKLSVRAHYQDGTQAVLPADKVTFSTSGEGEVAIRKGMLELHKPGAVTLNAEYEGAKDQVELTIQANTEKKIAQSIRPVNVVTDLHQEPSLPATVTVEYDKGFPKTHKVTWQAIPKEKLDSYQTFEVLGKVEGIDLEARAKVSVEGIVSVEEVSVTTPIAEAPQLPESVRTYDSNGHVSSAKVAWDAIRPEQYAKEGVFTVNGRLEGTQLTTKLHVRVSAQTEQGANISDQWTGSELPLAFASDSNPSDPVSNVNDKLISYNNQPANRWTNWNRTNPEASVGVLFGDSGILSKRSVDNLSVGFHEDHGVGVPKSYVIEYYVGKTVPTAPKNPSFVGNEDHVFNDSANWKPVTNLKAPAQLKAGEMNHFSFDKVETYAVRIRMVKADNKRGTSITEVQIFAKQVAAAKQGQTRIQVDGKDLANFNPDLTDYYLESVDGKVPAVTASVSNNGLATVVPSVREGEPVRVIAKAENGDILGEYRLHFTKDKSLLSHKPVAAVKQARLLQVGQALELPTKVPVYFTGKDGYETKDLTVEWEEVPAENLTKAGQFTVRGRVLGSNLVAEITVRVTDKLGETLSDNPNYDENSNQAFASATNDIDKNSHDRVDYLNDGDHSENRRWTNWSPTPSSNPEVSAGVIFRENGKIVERTVTQGKVQFFADSGTDAPSKLVLERYVGPEFEVPTYYSNYQAYDADHPFNNPENWEAVPYRADKDIAAGDEINVTFKAIKAKAMRWRMERKADKSGVAMIEMTFLAPSELPQESTQSKILVDGKELADFAENRQDYQITYKGQRPKVSVEENNQVASTVVDSGEDSFPVLVRLVSESGKQVKEYRIHLTKEKPVSEKTVAAVQEDLPKIEFVEKDLAYKTVEKKDSTLYLGETRVEQEGKVGKERIFTAINPDGSKEEKLREVVEVPTDRIVLVGTKPVAQEAKKPQVSEKADTKPIDSSEASQTNKAQGSGSGGGGETPETSPAIGKVVIKETGEGGALLGDAVFELKNNTDGTTVSQRTEAQTGEAIFSNIKPGTYTLTEAQPPVGYKPSTKQWTVEVEKNGRTTVQGEQVENREEALSDQYPQTGTYPDVQTPYQIIKVDGSEKNGQHKALNPNPYERVIPEGTLSKRIYQVNNLDDNQYGIELTVSGKTVYEQKDKSVPLDVVILLDNSNSMSNIRNKNARRAERAGEATRSLIDKITSDSENRVALVTYASTIFDGTEFTVEKGVADKNGKRLNDSLFWNYDQTSFTTNTKDYSYLKLTNDKNDIVELKNKVPTEAEDHDGNRLMYQFGATFTQKALMKADEILTQQARQNSQKVIFHITDGVPTMSYPINFNHATFAPSYQNQLNAFFSKSPNKDGILLSDFITQATSGEHTIVRGDGQSYQMFTDKTVYEKGAPAAFPVKPEKYSEMKAAGYAVIGDPINGGYIWLNWRESILAYPFNSNTAKITNHGDPTRWYYNGNIAPDGYDVFTVGIGINGDPGTDEATATSFMQSISSKPENYTNVTDTTKILEQLNRYFHTIVTEKKSIENGTITDPMGELIDLQLGTDGRFDPADYTLTANDGSRLENGQAVGGPQNDGGLLKNAKVLYDTTEKRIRVTGLYLGTDEKVTLTYNVRLNDEFVSNKFYDTNGRTTLHPKEVEQNTVRDFPIPKIRDVRKYPEITISKEKKLGDIEFIKVNKNDKKPLRGAVFSLQKQHPDYPDIYGAIDQNGTYQNVRTGEDGKLTFKNLSDGKYRLFENSEPAGYKPVQNKPIVAFQIVNGEVRDVTSIVPQDIPAGYEFTNDKHYITNEPIPPKRELEHHHHHH

SEQ ID NO: 229 - protein, 141 aa, Streptococcus pneumoniae
VSAQESSTYTVKEGDTLSEIAETHNTTVEKLAENNHIDNIHLIYVDQELVIDGPVAPVATPAPATYAAPAAQDETVSAPVAETPVVSETVVSTVSGSEAEAKEWIAQKESGGSYTATNGRYIGRYGSWTAAKNFWLNNGWY

SEQ ID NO: 230 - DNA, 26 bp, Artificial Sequence
  Poly(dIdC) oligonucleotide for IC-31
  N 1, 3, 5, 7, 9, 11, 13, 15, 17, 19, 21, 23, 25: N is Inosine
ncncncncncncncncncncncncnc

SEQ ID NO: 231 - protein, 11 aa, Artificial Sequence
  Polycationic polymer for IC-31
KLKLLLLLKLK

SEQ ID NO: 232 - protein, 6 aa, Artificial Sequence
  Glycine-rich linker
GSGGGG

SEQ ID NO: 233 - protein, 8 aa, Artificial Sequence
  Glycine-rich linker
GSGSGGGG

SEQ ID NO: 234 - protein, 6 aa, Artificial Sequence
  Hexa-histidine tag
HHHHHH

SEQ ID NO: 235 - protein, 5 aa, Artificial Sequence
  Linker peptide
AAALE
